United States Patent Application Publication US 2026/0327586 A1, published October 22, 2026 (application 19/483,778).

The application's sequence listing, which the Patent Office published only in electronic form, follows.

SEQUENCE LISTING (2119 sequences)

SEQ ID NO: 1 - DNA, 4107 bp, Streptococcus pyogenes
  source 1..4107: mol_type = genomic DNA
atggataagaaatactcaataggcttagatatcggcacaaatagcgtcggatgggcggtgatcactgatgaatataaggttccgtctaaaaagttcaaggttctgggaaatacagaccgccacagtatcaaaaaaaatcttataggggctcttttatttgacagtggagagacagcggaagcgactcgtctcaaacggacagctcgtagaaggtatacacgtcggaagaatcgtatttgttatctacaggagattttttcaaatgagatggcgaaagtagatgatagtttctttcatcgacttgaagagtcttttttggtggaagaagacaagaagcatgaacgtcatcctatttttggaaatatagtagatgaagttgcttatcatgagaaatatccaactatctatcatctgcgaaaaaaattggtagattctactgataaagcggatttgcgcttaatctatttggccttagcgcatatgattaagtttcgtggtcattttttgattgagggagatttaaatcctgataatagtgatgtggacaaactatttatccagttggtacaaacctacaatcaattatttgaagaaaaccctattaacgcaagtggagtagatgctaaagcgattctttctgcacgattgagtaaatcaagacgattagaaaatctcattgctcagctccccggtgagaagaaaaatggcttatttgggaatctcattgctttgtcattgggtttgacccctaattttaaatcaaattttgatttggcagaagatgctaaattacagctttcaaaagatacttacgatgatgatttagataatttattggcgcaaattggagatcaatatgctgatttgtttttggcagctaagaatttatcagatgctattttactttcagatatcctaagagtaaatactgaaataactaaggctcccctatcagcttcaatgattaaacgctacgatgaacatcatcaagacttgactcttttaaaagctttagttcgacaacaacttccagaaaagtataaagaaatcttttttgatcaatcaaaaaacggatatgcaggttatattgatgggggagctagccaagaagaattttataaatttatcaaaccaattttagaaaaaatggatggtactgaggaattattggtgaaactaaatcgtgaagatttgctgcgcaagcaacggacctttgacaacggctctattccccatcaaattcacttgggtgagctgcatgctattttgagaagacaagaagacttttatccatttttaaaagacaatcgtgagaagattgaaaaaatcttgacttttcgaattccttattatgttggtccattggcgcgtggcaatagtcgttttgcatggatgactcggaagtctgaagaaacaattaccccatggaattttgaagaagttgtcgataaaggtgcttcagctcaatcatttattgaacgcatgacaaactttgataaaaatcttccaaatgaaaaagtactaccaaaacatagtttgctttatgagtattttacggtttataacgaattgacaaaggtcaaatatgttactgaaggaatgcgaaaaccagcatttctttcaggtgaacagaagaaagccattgttgatttactcttcaaaacaaatcgaaaagtaaccgttaagcaattaaaagaagattatttcaaaaaaatagaatgttttgatagtgttgaaatttcaggagttgaagatagatttaatgcttcattaggtacctaccatgatttgctaaaaattattaaagataaagattttttggataatgaagaaaatgaagatatcttagaggatattgttttaacattgaccttatttgaagatagggagatgattgaggaaagacttaaaacatatgctcacctctttgatgataaggtgatgaaacagcttaaacgtcgccgttatactggttggggacgtttgtctcgaaaattgattaatggtattagggataagcaatctggcaaaacaatattagattttttgaaatcagatggttttgccaatcgcaattttatgcagctgatccatgatgatagtttgacatttaaagaagacattcaaaaagcacaagtgtctggacaaggcgatagtttacatgaacatattgcaaatttagctggtagccctgctattaaaaaaggtattttacagactgtaaaagttgttgatgaattggtcaaagtaatggggcggcataagccagaaaatatcgttattgaaatggcacgtgaaaatcagacaactcaaaagggccagaaaaattcgcgagagcgtatgaaacgaatcgaagaaggtatcaaagaattaggaagtcagattcttaaagagcatcctgttgaaaatactcaattgcaaaatgaaaagctctatctctattatctccaaaatggaagagacatgtatgtggaccaagaattagatattaatcgtttaagtgattatgatgtcgatcacattgttccacaaagtttccttaaagacgattcaatagacaataaggtcttaacgcgttctgataaaaatcgtggtaaatcggataacgttccaagtgaagaagtagtcaaaaagatgaaaaactattggagacaacttctaaacgccaagttaatcactcaacgtaagtttgataatttaacgaaagctgaacgtggaggtttgagtgaacttgataaagctggttttatcaaacgccaattggttgaaactcgccaaatcactaagcatgtggcacaaattttggatagtcgcatgaatactaaatacgatgaaaatgataaacttattcgagaggttaaagtgattaccttaaaatctaaattagtttctgacttccgaaaagatttccaattctataaagtacgtgagattaacaattaccatcatgcccatgatgcgtatctaaatgccgtcgttggaactgctttgattaagaaatatccaaaacttgaatcggagtttgtctatggtgattataaagtttatgatgttcgtaaaatgattgctaagtctgagcaagaaataggcaaagcaaccgcaaaatatttcttttactctaatatcatgaacttcttcaaaacagaaattacacttgcaaatggagagattcgcaaacgccctctaatcgaaactaatggggaaactggagaaattgtctgggataaagggcgagattttgccacagtgcgcaaagtattgtccatgccccaagtcaatattgtcaagaaaacagaagtacagacaggcggattctccaaggagtcaattttaccaaaaagaaattcggacaagcttattgctcgtaaaaaagactgggatccaaaaaaatatggtggttttgatagtccaacggtagcttattcagtcctagtggttgctaaggtggaaaaagggaaatcgaagaagttaaaatccgttaaagagttactagggatcacaattatggaaagaagttcctttgaaaaaaatccgattgactttttagaagctaaaggatataaggaagttaaaaaagacttaatcattaaactacctaaatatagtctttttgagttagaaaacggtcgtaaacggatgctggctagtgccggagaattacaaaaaggaaatgagctggctctgccaagcaaatatgtgaattttttatatttagctagtcattatgaaaagttgaagggtagtccagaagataacgaacaaaaacaattgtttgtggagcagcataagcattatttagatgagattattgagcaaatcagtgaattttctaagcgtgttattttagcagatgccaatttagataaagttcttagtgcatataacaaacatagagacaaaccaatacgtgaacaagcagaaaatattattcatttatttacgttgacgaatcttggagctcccgctgcttttaaatattttgatacaacaattgatcgtaaacgatatacgtctacaaaagaagttttagatgccactcttatccatcaatccatcactggtctttatgaaacacgcattgatttgagtcagctaggaggtgactga

SEQ ID NO: 2 - protein, 1368 aa, Streptococcus pyogenes [sequence omitted]

SEQ ID NO: 3 - protein, 1053 aa, Staphylococcus aureus
MKRNYILGLDIGITSVGYGIIDYETRDVIDAGVRLFKEANVENNEGRRSKRGARRLKRRRRHRIQRVKKLLFDYNLLTDHSELSGINPYEARVKGLSQKLSEEEFSAALLHLAKRRGVHNVNEVEEDTGNELSTKEQISRNSKALEEKYVAELQLERLKKDGEVRGSINRFKTSDYVKEAKQLLKVQKAYHQLDQSFIDTYIDLLETRRTYYEGPGEGSPFGWKDIKEWYEMLMGHCTYFPEELRSVKYAYNADLYNALNDLNNLVITRDENEKLEYYEKFQIIENVFKQKKKPTLKQIAKEILVNEEDIKGYRVTSTGKPEFTNLKVYHDIKDITARKEIIENAELLDQIAKILTIYQSSEDIQEELTNLNSELTQEEIEQISNLKGYTGTHNLSLKAINLILDELWHTNDNQIAIFNRLKLVPKKVDLSQQKEIPTTLVDDFILSPVVKRSFIQSIKVINAIIKKYGLPNDIIIELAREKNSKDAQKMINEMQKRNRQTNERIEEIIRTTGKENAKYLIEKIKLHDMQEGKCLYSLEAIPLEDLLNNPFNYEVDHIIPRSVSFDNSFNNKVLVKQEENSKKGNRTPFQYLSSSDSKISYETFKKHILNLAKGKGRISKTKKEYLLEERDINRFSVQKDFINRNLVDTRYATRGLMNLLRSYFRVNNLDVKVKSINGGFTSFLRRKWKFKKERNKGYKHHAEDALIIANADFIFKEWKKLDKAKKVMENQMFEEKQAESMPEIETEQEYKEIFITPHQIKHIKDFKDYKYSHRVDKKPNRELINDTLYSTRKDDKGNTLIVNNLNGLYDKDNDKLKKLINKSPEKLLMYHHDPQTYQKLKLIMEQYGDEKNPLYKYYEETGNYLTKYSKKDNGPVIKKIKYYGNKLNAHLDITDDYPNSRNKVVKLSLKPYRFDVYLDNGVYKFVTVKNLDVIKKENYYEVNSKCYEEAKKLKKISNQAEFIASFYNNDLIKINGELYRVIGVNNDLLNRIEVNMIDITYREYLENMNDKRPPRIIKTIASKTQSIKKYSTDILGNLYEVKSKKHPQIIKKG

SEQ ID NO: 4 - protein, 1300 aa, unidentified
  source 1..1300: note = Francisella novicida
MSIYQEFVNKYSLSKTLRFELIPQGKTLENIKARGLILDDEKRAKDYKKAKQIIDKYHQFFIEEILSSVCISEDLLQNYSDVYFKLKKSDDDNLQKDFKSAKDTIKKQISEYIKDSEKFKNLFNQNLIDAKKGQESDLILWLKQSKDNGIELFKANSDITDIDEALEIIKSFKGWTTYFKGFHENRKNVYSSNDIPTSIIYRIVDDNLPKFLENKAKYESLKDKAPEAINYEQIKKDLAEELTFDIDYKTSEVNQRVFSLDEVFEIANFNNYLNQSGITKFNTIIGGKFVNGENTKRKGINEYINLYSQQINDKTLKKYKMSVLFKQILSDTESKSFVIDKLEDDSDVVTTMQSFYEQIAAFKTVEEKSIKETLSLLFDDLKAQKLDLSKIYFKNDKSLTDLSQQVFDDYSVIGTAVLEYITQQIAPKNLDNPSKKEQELIAKKTEKAKYLSLETIKLALEEFNKHRDIDKQCRFEEILANFAAIPMIFDEIAQNKDNLAQISIKYQNQGKKDLLQASAEDDVKAIKDLLDQTNNLLHKLKIFHISQSEDKANILDKDEHFYLVFEECYFELANIVPLYNKIRNYITQKPYSDEKFKLNFENSTLANGWDKNKEPDNTAILFIKDDKYYLGVMNKKNNKIFDDKAIKENKGEGYKKIVYKLLPGANKMLPKVFFSAKSIKFYNPSEDILRIRNHSTHTKNGSPQKGYEKFEFNIEDCRKFIDFYKQSISKHPEWKDFGFRFSDTQRYNSIDEFYREVENQGYKLTFENISESYIDSVVNQGKLYLFQIYNKDFSAYSKGRPNLHTLYWKALFDERNLQDVVYKLNGEAELFYRKQSIPKKITHPAKEAIANKNKDNPKKESVFEYDLIKDKRFTEDKFFFHCPITINFKSSGANKFNDEINLLLKEKANDVHILSIDRGERHLAYYTLVDGKGNIIKQDTFNIIGNDRMKTNYHDKLAAIEKDRDSARKDWKKINNIKEMKEGYLSQVVHEIAKLVIEYNAIVVFEDLNFGFKRGRFKVEKQVYQKLEKMLIEKLNYLVFKDNEFDKTGGVLRAYQLTAPFETFKKMGKQTGIIYYVPAGFTSKICPVTGFVNQLYPKYESVSKSQEFFSKFDKICYNLDKGYFEFSFDYKNFGDKAAKGKWTIASFGSRLINFRNSDKNHNWDTREVYPTKELEKLLKDYSIEYGHGECIKAAICGESDKKFFAKLTSVLNTILQMRNSKTGTELDYLISPVADVNGNFFDSRQAPKNMPQDADANGAYHIGLKGLMLLGRIKNNQEGKKLNLVIKNEEYFEFVQNRNN

SEQ ID NO: 5 - protein, 986 aa, synthetic construct
MEKRINKIRKKLSADNATKPVSRSGPMKTLLVRVMTDDLKKRLEKRRKKPEVMPQVISNNAANNLRMLLDDYTKMKEAILQVYWQEFKDDHVGLMCKFAQPASKKIDQNKLKPEMDEKGNLTTAGFACSQCGQPLFVYKLEQVSEKGKAYTNYFGRCNVAEHEKLILLAQLKPEKDSDEAVTYSLGKFGQRALDFYSIHVTKESTHPVKPLAQIAGNRYASGPVGKALSDACMGTIASFLSKYQDIIIEHQKVVKGNQKRLESLRELAGKENLEYPSVTLPPQPHTKEGVDAYNEVIARVRMWVNLNLWQKLKLSRDDAKPLLRLKGFPSFPVVERRENEVDWWNTINEVKKLIDAKRDMGRVFWSGVTAEKRNTILEGYNYLPNENDHKKREGSLENPKKPAKRQFGDLLLYLEKKYAGDWGKVFDEAWERIDKKIAGLTSHIEREEARNAEDAQSKAVLTDWLRAKASFVLERLKEMDEKEFYACEIQLQKWYGDLRGNPFAVEAENRVVDISGFSIGSDGHSIQYRNLLAWKYLENGKREFYLLMNYGKKGRIRFTDGTDIKKSGKWQGLLYGGGKAKVIDLTFDPDDEQLIILPLAFGTRQGREFIWNDLLSLETGLIKLANGRVIEKTIYNKKIGRDEPALFVALTFERREVVDPSNIKPVNLIGVDRGENIPAVIALTDPEGCPLPEFKDSSGGPTDILRIGEGYKEKQRAIQAAKEVEQRRAGGYSRKFASKSRNLADDMVRNSARDLFYHAVTHDAVLVFENLSRGFGRQGKRTFMTERQYTKMEDWLTAKLAYEGLTSKTYLSKTLAQYTSKTCSNCGFTITTADYDGMLVRLKKTSDGWATTLNNKELKAEGQITYYNRYKRQTVEKELSAELDRLSEESGNNDISKWTKGRRDEALFLLKKRFSHRPVQEQFVCLDCGHEVHADEQAALNIARSWLFLNSNSTEFKSYKSGKQPFVGAWQAFYKRRLKEVWKPNA

SEQ ID NO: 6 - protein, 1125 aa, synthetic construct
MRKKLFKGYILHNKRLVYTGKAAIRSIKYPLVAPNKTALNNLSEKIIYDYEHLFGPLNVASYARNSNRYSLVDFWIDSLRAGVIWQSKSTSLIDLISKLEGSKSPSEKIFEQIDFELKNKLDKEQFKDIILLNTGIRSSSNVRSLRGRFLKCFKEEFRDTEEVIACVDKWSKDLIVEGKSILVSKQFLYWEEEFGIKIFPHFKDNHDLPKLTFFVEPSLEFSPHLPLANCLERLKKFDISRESLLGLDNNFSAFSNYFNELFNLLSRGEIKKIVTAVLAVSKSWENEPELEKRLHFLSEKAKLLGYPKLTSSWADYRMIIGGKIKSWHSNYTEQLIKVREDLKKHQIALDKLQEDLKKVVDSSLREQIEAQREALLPLLDTMLKEKDFSDDLELYRFILSDFKSLLNGSYQRYIQTEEERKEDRDVTKKYKDLYSNLRNIPRFFGESKKEQFNKFINKSLPTIDVGLKILEDIRNALETVSVRKPPSITEEYVTKQLEKLSRKYKINAFNSNRFKQITEQVLRKYNNGELPKISEVFYRYPRESHVAIRILPVKISNPRKDISYLLDKYQISPDWKNSNPGEVVDLIEIYKLTLGWLLSCNKDFSMDFSSYDLKLFPEAASLIKNFGSCLSGYYLSKMIFNCITSEIKGMITLYTRDKFVVRYVTQMIGSNQKFPLLCLVGEKQTKNFSRNWGVLIEEKGDLGEEKNQEKCLIFKDKTDFAKAKEVEIFKNNIWRIRTSKYQIQFLNRLFKKTKEWDLMNLVLSEPSLVLEEEWGVSWDKDKLLPLLKKEKSCEERLYYSLPLNLVPATDYKEQSAEIEQRNTYLGLDVGEFGVAYAVVRIVRDRIELLSWGFLKDPALRKIRERVQDMKKKQVMAVFSSSSTAVARVREMAIHSLRNQIHSIALAYKAKIIYEISISNFETGGNRMAKIYRSIKVSDVYRESGADTLVSEMIWGKKNKQMGNHISSYATSYTCCNCARTPFELVIDNDKEYEKGGDEFIFNVGDEKKVRGFLQKSLLGKTIKGKEVLKSIKEYARPPIREVLLEGEDVEQLLKRRGNSYIYRCPFCGYKTDADIQAALNIACRGYISDNAKDAVKEGERKLDYILEVRKLWEKNGAVLRSAKFL

SEQ ID NO: 7 - protein, 707 aa, synthetic construct
MADTPTLFTQFLRHHLPGQRFRKDILKQAGRILANKGEDATIAFLRGKSEESPPDFQPPVKCPIIACSRPLTEWPIYQASVAIQGYVYGQSLAEFEASDPGCSKDGLLGWFDKTGVCTDYFSVQGLNLIFQNARKRYIGVQTKVTNRNEKRHKKLKRINAKRIAEGLPELTSDEPESALDETGHLIDPPGLNTNIYCYQQVSPKPLALSEVNQLPTAYAGYSTSGDDPIQPMVTKDRLSISKGQPGYIPEHQRALLSQKKHRRMRGYGLKARALLVIVRIQDDWAVIDLRSLLRNAYWRRIVQTKEPSTITKLLKLVTGDPVLDATRMVATFTYKPGIVQVRSAKCLKNKQGSKLFSERYLNETVSVTSIDLGSNNLVAVATYRLVNGNTPELLQRFTLPSHLVKDFERYKQAHDTLEDSIQKTAVASLPQGQQTEIRMWSMYGFREAQERVCQELGLADGSIPWNVMTATSTILTDLFLARGGDPKKCMFTSEPKKKKNSKQVLYKIRDRAWAKMYRTLLSKETREAWNKALWGLKRGSPDYARLSKRKEELARRCVNYTISTAEKRAQCGRTIVALEDLNIGFFHGRGKQEPGWVGLFTRKKENRWLMQALHKAFLELAHHRGYHVIEVNPAYTSQTCPVCRHCDPDNRDQHNREAFHCIGCGFRGNADLDVATHNIAMVAITGESLKRARGSVASKTPQPLAAE

SEQ ID NO: 8 - protein, 426 aa, synthetic construct
MIKVYRYEIVKPLDLDWKEFGTILRQLQQETRFALNKATQLAWEWMGFSSDYKDNHGEYPKSKDILGYTNVHGYAYHTIKTKAYRLNSGNLSQTIKRATDRFKAYQKEILRGDMSIPSYKRDIPLDLIKENISVNRMNHGDYIASLSLLSNPAKQEMNVKRKISVIIIVRGAGKTIMDRILSGEYQVSASQIIHDDRKNKWYLNISYDFEPQTRVLDLNKIMGIDLGVAVAVYMAFQHTPARYKLEGGEIENFRRQVESRRISMLRQGKYAGGARGGHGRDKRIKPIEQLRDKIANFRDTTNHRYSRYIVDMAIKEGCGTIQMEDLTNIRDIGSRFLQNWTYYDLQQKIIYKAEEAGIKVIKIDPQYTSQRCSECGNIDSGNRIGQAIFKCRACGYEANADYNAARNIAIPNIDKIIAESIKSGGS

SEQ ID NO: 9 - protein, 509 aa, synthetic construct
NAMIAQKTIKIKLNPTKEQIIKLNSIIEEYIKVSNFTAKKIAEIQESFTDSGLTQGTCSECGKEKTYRKYHLLKKDNKLFCITCYKRKYSQFTLQKVEFQNKTGLRNVAKLPKTYYTNAIRFASDTFSGFDEIIKKKQNRLNSIQNRLNFWKELLYNPSNRNEIKIKVVKYAPKTDTREHPHYYSEAEIKGRIKRLEKQLKKFKMPKYPEFTSETISLQRELYSWKNPDELKISSITDKNESMNYYGKEYLKRYIDLINSQTPQILLEKENNSFYLCFPITKNIEMPKIDDTFEPVGIDWGITRNIAVVSILDSKTKKPKFVKFYSAGYILGKRKHYKSLRKHFGQKKRQDKINKLGTKEDRFIDSNIHKLAFLIVKEIRNHSNKPIILMENITDNREEAEKSMRQNILLHSVKSRLQNYIAYKALWNNIPTNLVKPEHTSQICNRCGHQDRENRPKGSKLFKCVKCNYMSNADFNASINIARKFYIGEYEPFYKDNEKMKSGVNSISM

SEQ ID NO: 10 - protein, 501 aa, synthetic construct
MEVQKTVMKTLSLRILRPLYSQEIEKEIKEEEKERRKQAGGTGELDGGFYKKLEKKHSEMFSFDRLNLLLNQLQREIAKVYNHAISELYIATIAQGNKSNKHYISSIVYNRAYGYFYNAYIALGICSKVEANFRSNELLTQQSALPTAKSDNFPIVLHKQKGAEGEDGGFRISTEGSDLIFEIPIPFYEYNGENRKEPYKWVKKGGQKPVLKLILSTFRRQRNKGWAKDEGTDAEIRKVTEGKYQVSQIEINRGKKLGEHQKWFANFSIEQPIYERKPNRSIVGGLDVGIRSPLVCAINNSFSRYSVDSNDVFKFSKQVFAFRRRLLSKNSLKRKHGHAAHKLEPITEMTEKNDKFRKKIIERWAKEVTNFFVKNQVGIVQIEDLSTMKDREDHFFNQYLRGFWPYYQMQTLIENKLKEYGIEVKRVQAKYTSQLCSNPNCRYWNNYFNFEYRKVNKFPKFKCEKCNLEISADYNAARNLSTPDIEKFVAKATKGINLPEK

SEQ ID NO: 11 - protein, 582 aa, synthetic construct
MKVLEFKIHPTEEQVSKIDQSLAACKLLWNLSIALKEESKQRYYRKKHKFDEFSPEIWGLSYSGHYDEKEFKTLKDKEKKLLIGNPCCKIAYFKKTSNGKEYTPLNSIPIRRFMNAENIDKDAVNYLNRKKLAFYFRENTAKFIGEIETEFKKGFFKSVIKPAYDAAKKGIRGIPRFKGRRDKVETLVNGQPETIKIKSNGVIVSSKIGLLKIRGLDRLQGKAPRMAKITRKATGYYLQLTIETDDTIYKESDKCVGLDMGAVAIFTDDLGRQSEAKRYAKIQKKRLNRLQRQASRQKDNSNNQRKTYAKLARVHEKIARQRKGRNAQLAHKITSEYQSVILEDLNLKNMTAAAKPKEREDGDGYKQNGKKRKSGLNKALLDNAIGQLRTFIENKANERGRKIIRVNPKHTSQTCPNCGNIDKANRVSQSKFKCVSCGYEAHADQNAAANILIRGLRDEFLRAIGSLYKFPVSMIGKYPGLAGEFTPDLDANQESIGDAPIENAEHSISKQMKQEGNRTPTQPENGSQSLIFLSAPPQPCGDSHGTNNPKALPNKASKRSSKKPRGAIPENPDQLTIWDLLD

SEQ ID NO: 12 - protein, 1368 aa, synthetic construct
MDKKYSIGLAIGTNSVGWAVITDEYKVPSKKFKVLGNTDRHSIKKNLIGALLFDSGETAEATRLKRTARRRYTRRKNRICYLQEIFSNEMAKVDDSFFHRLEESFLVEEDKKHERHPIFGNIVDEVAYHEKYPTIYHLRKKLVDSTDKADLRLIYLALAHMIKFRGHFLIEGDLNPDNSDVDKLFIQLVQTYNQLFEENPINASGVDAKAILSARLSKSRRLENLIAQLPGEKKNGLFGNLIALSLGLTPNFKSNFDLAEDAKLQLSKDTYDDDLDNLLAQIGDQYADLFLAAKNLSDAILLSDILRVNTEITKAPLSASMIKRYDEHHQDLTLLKALVRQQLPEKYKEIFFDQSKNGYAGYIDGGASQEEFYKFIKPILEKMDGTEELLVKLNREDLLRKQRTFDNGSIPHQIHLGELHAILRRQEDFYPFLKDNREKIEKILTFRIPYYVGPLARGNSRFAWMTRKSEETITPWNFEEVVDKGASAQSFIERMTNFDKNLPNEKVLPKHSLLYEYFTVYNELTKVKYVTEGMRKPAFLSGEQKKAIVDLLFKTNRKVTVKQLKEDYFKKIECFDSVEISGVEDRFNASLGTYHDLLKIIKDKDFLDNEENEDILEDIVLTLTLFEDREMIEERLKTYAHLFDDKVMKQLKRRRYTGWGRLSRKLINGIRDKQSGKTILDFLKSDGFANRNFMQLIHDDSLTFKEDIQKAQVSGQGDSLHEHIANLAGSPAIKKGILQTVKVVDELVKVMGRHKPENIVIEMARENQTTQKGQKNSRERMKRIEEGIKELGSQILKEHPVENTQLQNEKLYLYYLQNGRDMYVDQELDINRLSDYDVDAIVPQSFLKDDSIDNKVLTRSDKNRGKSDNVPSEEVVKKMKNYWRQLLNAKLITQRKFDNLTKAERGGLSELDKAGFIKRQLVETRQITKHVAQILDSRMNTKYDENDKLIREVKVITLKSKLVSDFRKDFQFYKVREINNYHHAHDAYLNAVVGTALIKKYPKLESEFVYGDYKVYDVRKMIAKSEQEIGKATAKYFFYSNIMNFFKTEITLANGEIRKRPLIETNGETGEIVWDKGRDFATVRKVLSMPQVNIVKKTEVQTGGFSKESILPKRNSDKLIARKKDWDPKKYGGFDSPTVAYSVLVVAKVEKGKSKKLKSVKELLGITIMERSSFEKNPIDFLEAKGYKEVKKDLIIKLPKYSLFELENGRKRMLASAGELQKGNELALPSKYVNFLYLASHYEKLKGSPEDNEQKQLFVEQHKHYLDEIIEQISEFSKRVILADANLDKVLSAYNKHRDKPIREQAENIIHLFTLTNLGAPAAFKYFDTTIDRKRYTSTKEVLDATLIHQSITGLYETRIDLSQLGGD

SEQ ID NO: 13 - protein, 1053 aa, synthetic construct
MKRNYILGLAIGITSVGYGIIDYETRDVIDAGVRLFKEANVENNEGRRSKRGARRLKRRRRHRIQRVKKLLFDYNLLTDHSELSGINPYEARVKGLSQKLSEEEFSAALLHLAKRRGVHNVNEVEEDTGNELSTKEQISRNSKALEEKYVAELQLERLKKDGEVRGSINRFKTSDYVKEAKQLLKVQKAYHQLDQSFIDTYIDLLETRRTYYEGPGEGSPFGWKDIKEWYEMLMGHCTYFPEELRSVKYAYNADLYNALNDLNNLVITRDENEKLEYYEKFQIIENVFKQKKKPTLKQIAKEILVNEEDIKGYRVTSTGKPEFTNLKVYHDIKDITARKEIIENAELLDQIAKILTIYQSSEDIQEELTNLNSELTQEEIEQISNLKGYTGTHNLSLKAINLILDELWHTNDNQIAIFNRLKLVPKKVDLSQQKEIPTTLVDDFILSPVVKRSFIQSIKVINAIIKKYGLPNDIIIELAREKNSKDAQKMINEMQKRNRQTNERIEEIIRTTGKENAKYLIEKIKLHDMQEGKCLYSLEAIPLEDLLNNPFNYEVDHIIPRSVSFDNSFNNKVLVKQEEASKKGNRTPFQYLSSSDSKISYETFKKHILNLAKGKGRISKTKKEYLLEERDINRFSVQKDFINRNLVDTRYATRGLMNLLRSYFRVNNLDVKVKSINGGFTSFLRRKWKFKKERNKGYKHHAEDALIIANADFIFKEWKKLDKAKKVMENQMFEEKQAESMPEIETEQEYKEIFITPHQIKHIKDFKDYKYSHRVDKKPNRELINDTLYSTRKDDKGNTLIVNNLNGLYDKDNDKLKKLINKSPEKLLMYHHDPQTYQKLKLIMEQYGDEKNPLYKYYEETGNYLTKYSKKDNGPVIKKIKYYGNKLNAHLDITDDYPNSRNKVVKLSLKPYRFDVYLDNGVYKFVTVKNLDVIKKENYYEVNSKCYEEAKKLKKISNQAEFIASFYNNDLIKINGELYRVIGVNNDLLNRIEVNMIDITYREYLENMNDKRPPRIIKTIASKTQSIKKYSTDILGNLYEVKSKKHPQIIKKG

SEQ ID NO: 14 - protein, 1300 aa, synthetic construct
MSIYQEFVNKYSLSKTLRFELIPQGKTLENIKARGLILDDEKRAKDYKKAKQIIDKYHQFFIEEILSSVCISEDLLQNYSDVYFKLKKSDDDNLQKDFKSAKDTIKKQISEYIKDSEKFKNLFNQNLIDAKKGQESDLILWLKQSKDNGIELFKANSDITDIDEALEIIKSFKGWTTYFKGFHENRKNVYSSNDIPTSIIYRIVDDNLPKFLENKAKYESLKDKAPEAINYEQIKKDLAEELTFDIDYKTSEVNQRVFSLDEVFEIANFNNYLNQSGITKFNTIIGGKFVNGENTKRKGINEYINLYSQQINDKTLKKYKMSVLFKQILSDTESKSFVIDKLEDDSDVVTTMQSFYEQIAAFKTVEEKSIKETLSLLFDDLKAQKLDLSKIYFKNDKSLTDLSQQVFDDYSVIGTAVLEYITQQIAPKNLDNPSKKEQELIAKKTEKAKYLSLETIKLALEEFNKHRDIDKQCRFEEILANFAAIPMIFDEIAQNKDNLAQISIKYQNQGKKDLLQASAEDDVKAIKDLLDQTNNLLHKLKIFHISQSEDKANILDKDEHFYLVFEECYFELANIVPLYNKIRNYITQKPYSDEKFKLNFENSTLANGWDKNKEPDNTAILFIKDDKYYLGVMNKKNNKIFDDKAIKENKGEGYKKIVYKLLPGANKMLPKVFFSAKSIKFYNPSEDILRIRNHSTHTKNGSPQKGYEKFEFNIEDCRKFIDFYKQSISKHPEWKDFGFRFSDTQRYNSIDEFYREVENQGYKLTFENISESYIDSVVNQGKLYLFQIYNKDFSAYSKGRPNLHTLYWKALFDERNLQDVVYKLNGEAELFYRKQSIPKKITHPAKEAIANKNKDNPKKESVFEYDLIKDKRFTEDKFFFHCPITINFKSSGANKFNDEINLLLKEKANDVHILSIARGERHLAYYTLVDGKGNIIKQDTFNIIGNDRMKTNYHDKLAAIEKDRDSARKDWKKINNIKEMKEGYLSQVVHEIAKLVIEYNAIVVFEDLNFGFKRGRFKVEKQVYQKLEKMLIEKLNYLVFKDNEFDKTGGVLRAYQLTAPFETFKKMGKQTGIIYYVPAGFTSKICPVTGFVNQLYPKYESVSKSQEFFSKFDKICYNLDKGYFEFSFDYKNFGDKAAKGKWTIASFGSRLINFRNSDKNHNWDTREVYPTKELEKLLKDYSIEYGHGECIKAAICGESDKKFFAKLTSVLNTILQMRNSKTGTELDYLISPVADVNGNFFDSRQAPKNMPQDADANGAYHIGLKGLMLLGRIKNNQEGKKLNLVIKNEEYFEFVQNRNN

SEQ ID NO: 15 - protein, 1082 aa, synthetic construct
MAAFKPNSINYILGLAIGIASVGWAMVEIDEEENPIRLIDLGVRVFERAEVPKTGDSLAMARRLARSVRRLTRRRAHRLLRTRRLLKREGVLQAANFDENGLIKSLPNTPWQLRAAALDRKLTPLEWSAVLLHLIKHRGYLSQRKNEGETADKELGALLKGVAGNAHALQTGDFRTPAELALNKFEKESGHIRNQRSDYSHTFSRKDLQAELILLFEKQKEFGNPHVSGGLKEGIETLLMTQRPALSGDAVQKMLGHCTFEPAEPKAAKNTYTAERFIWLTKLNNLRILEQGSERPLTDTERATLMDEPYRKSKLTYAQARKLLGLEDTAFFKGLRYGKDNAEASTLMEMKAYHAISRALEKEGLKDKKSPLNLSPELQDEIGTAFSLFKTDEDITGRLKDRIQPEILEALLKHISFDKFVQISLKALRRIVPLMEQGKRYDEACAEIYGDHYGKKNTEEKIYLPPIPADEIRNPVVLRALSQARKVINGVVRRYGSPARIHIETAREVGKSFKDRKEIEKRQEENRKDREKAAAKFREYFPNFVGEPKSKDILKLRLYEQQHGKCLYSGKEINLGRLNEKGYVEIDAALPFSRTWDDSFNNKVLVLGSENQNKGNQTPYEYFNGKDNSREWQEFKARVETSRFPRSKKQRILLQKFDEDGFKERNLNDTRYVNRFLCQFVADRMRLTGKGKKRVFASNGQITNLLRGFWGLRKVRAENDRHHALDAVVVACSTVAMQQKITRFVRYKEMNAFDGKTIDKETGEVLHQKTHFPQPWEFFAQEVMIRVFGKPDGKPEFEEADTLEKLRTLLAEKLSSRPEAVHEYVTPLFVSRAPNRKMSGQGHMETVKSAKRLDEGVSVLRVPLTQLKLKDLEKMVNREREPKLYEALKARLEAHKDDPAKAFAEPFYKYDKAGNRTQQVKAVRVEQVQKTGVWVRNHNGIADNATMVRVDVFEKGDKYYLVPIYSWQVAKGILPDRAVVQGKDEEDWQLIDDSFNFKFSLHPNDLVEVITKKARMFGYFASCHRGTGNINIRIHDLDHKIGKNGILEGIGVKTALSFQKYQIDELGKEIRPCRLKKRPPVR

SEQ ID NO: 16 - protein, 984 aa, synthetic construct
MARILAFAIGISSIGWAFSENDELKDCGVRIFTKVENPKTGESLALPRRLARSARKRLARRKARLNHLKHLIANEFKLNYEDYQSFDESLAKAYKGSLISPYELRFRALNELLSKQDFARVILHIAKRRGYDDIKNSDDKEKGAILKAIKQNEEKLANYQSVGEYLYKEYFQKFKENSKEFTNVRNKKESYERCIAQSFLKDELKLIFKKQREFGFSFSKKFEEEVLSVAFYKRALKDFSHLVGNCSFFTDEKRAPKNSPLAFMFVALTRIINLLNNLKNTEGILYTKDDLNALLNEVLKNGTLTYKQTKKLLGLSDDYEFKGEKGTYFIEFKKYKEFIKALGEHNLSQDDLNEIAKDITLIKDEIKLKKALAKYDLNQNQIDSLSKLEFKDHLNISFKALKLVTPLMLEGKKYDEACNELNLKVAINEDKKDFLPAFNETYYKDEVTNPVVLRAIKEYRKVLNALLKKYGKVHKINIELAREVGKNHSQRAKIEKEQNENYKAKKDAELECEKLGLKINSKNILKLRLFKEQKEFCAYSGEKIKISDLQDEKMLEIDAIYPYSRSFDDSYMNKVLVFTKQNQEKLNQTPFEAFGNDSAKWQKIEVLAKNLPTKKQKRILDKNYKDKEQKNFKDRNLNDTRYIARLVLNYTKDYLDFLPLSDDENTKLNDTQKGSKVHVEAKSGMLTSALRHTWGFSAKDRNNHLHHAIDAVIIAYANNSIVKAFSDFKKEQESNSAELYAKKISELDYKNKRKFFEPFSGFRQKVLDKIDEIFVSKPERKKPSGALHEETFRKEEEFYQSYGGKEGVLKALELGKIRKVNGKIVKNGDMFRVDIFKHKKTNKFYAVPIYTMDFALKVLPNKAVARSKKGEIKDWILMDENYEFCFSLYKDSLILIQTKDMQEPEFVYYNAFTSSTVSLIVSKHDNKFETLSKNQKILFKNANEKEVIAKSIGIQNLKVFEKYIVSALGEVTKAEFRQREDFKK

SEQ ID NO: 17 - protein, 1122 aa, synthetic construct
MGSDLVLGLAIGIGSVGVGILNKVTGEIIHKNSRIFPAAQAENNLVRRTNRQGRRLARRKKHRRVRLNRLFEESGLITDFTKISINLNPYQLRVKGLTDELSNEELFIALKNMVKHRGISYLDDASDDGNSSVGDYAQIVKENSKQLETKTPGQIQLERYQTYGQLRGDFTVEKDGKKHRLINVFPTSAYRSEALRILQTQQEFNPQITDEFINRYLEILTGKRKYYHGPGNEKSRTDYGRYRTSGETLDNIFGILIGKCTFYPDEFRAAKASYTAQEFNLLNDLNNLTVPTETKKLSKEQKNQIINYVKNEKAMGPAKLFKYIAKLLSCDVADIKGYRIDKSGKAEIHTFEAYRKMKTLETLDIEQMDRETLDKLAYVLTLNTEREGIQEALEHEFADGSFSQKQVDELVQFRKANSSIFGKGWHNFSVKLMMELIPELYETSEEQMTILTRLGKQKTTSSSNKTKYIDEKLLTEEIYNPVVAKSVRQAIKIVNAAIKEYGDFDNIVIEMARETNEDDEKKAIQKIQKANKDEKDAAMLKAANQYNGKAELPHSVFHGHKQLATKIRLWHQQGERCLYTGKTISIHDLINNSNQFEVDAILPLSITFDDSLANKVLVYATANQEKGQRTPYQALDSMDDAWSFRELKAFVRESKTLSNKKKEYLLTEEDISKFDVRKKFIERNLVDTRYASRVVLNALQEHFRAHKIDTKVSVVRGQFTSQLRRHWGIEKTRDTYHHHAVDALIIAASSQLNLWKKQKNTLVSYSEDQLLDIETGELISDDEYKESVFKAPYQHFVDTLKSKEFEDSILFSYQVDSKFNRKISDATIYATRQAKVGKDKADETYVLGKIKDIYTQDGYDAFMKIYKKDKSKFLMYRHDPQTFEKVIEPILENYPNKQINEKGKEVPCNPFLKYKEEHGYIRKYSKKGNGPEIKSLKYYDSKLGNHIDITPKDSNNKVVLQSVSPWRADVYFNKTTGKYEILGLKYADLQFEKGTGTYKISQEKYNDIKKKEGVDSDSEFKFTLYKNDLLLVKDTETKEQQLFRFLSRTMPKQKHYVELKPYDKQKFEGGEALIKVLGNVANSGQCKKGLGKSNISIYKVRTDVLGNQHIIKNEGDKPKLDF

SEQ ID NO: 18 - protein, 1388 aa, synthetic construct
MTKPYSIGLAIGTNSVGWAVITDNYKVPSKKMKVLGNTSKKYIKKNLLGVLLFDSGITAEGRRLKRTARRRYTRRRNRILYLQEIFSTEMATLDDAFFQRLDDSFLVPDDKRDSKYPIFGNLVEEKVYHDEFPTIYHLRKYLADSTKKADLRLVYLALAHMIKYRGHFLIEGEFNSKNNDIQKNFQDFLDTYNAIFESDLSLENSKQLEEIVKDKISKLEKKDRILKLFPGEKNSGIFSEFLKLIVGNQADFRKCFNLDEKASLHFSKESYDEDLETLLGYIGDDYSDVFLKAKKLYDAILLSGFLTVTDNETEAPLSSAMIKRYNEHKEDLALLKEYIRNISLKTYNEVFKDDTKNGYAGYIDGKTNQEDFYVYLKNLLAEFEGADYFLEKIDREDFLRKQRTFDNGSIPYQIHLQEMRAILDKQAKFYPFLAKNKERIEKILTFRIPYYVGPLARGNSDFAWSIRKRNEKITPWNFEDVIDKESSAEAFINRMTSFDLYLPEEKVLPKHSLLYETFNVYNELTKVRFIAESMRDYQFLDSKQKKDIVRLYFKDKRKVTDKDIIEYLHAIYGYDGIELKGIEKQFNSSLSTYHDLLNIINDKEFLDDSSNEAIIEEIIHTLTIFEDREMIKQRLSKFENIFDKSVLKKLSRRHYTGWGKLSAKLINGIRDEKSGNTILDYLIDDGISNRNFMQLIHDDALSFKKKIQKAQIIGDEDKGNIKEVVKSLPGSPAIKKGILQSIKIVDELVKVMGGRKPESIVVEMARENQYTNQGKSNSQQRLKRLEKSLKELGSKILKENIPAKLSKIDNNALQNDRLYLYYLQNGKDMYTGDDLDIDRLSNYDIDHIIPQAFLKDNSIDNKVLVSSASARGKSDDFPSLEVVKKRKTFWYQLLKSKLISQRKFDNLTKAERGGLLPEDKAGFIQRQLVETRQITKHVARLLDEKFNNKKDENNRAVRTVKIITLKSTLVSQFRKDFELYKVREINDFHHAHDAYLNAVIASALLKKYPKLEPEFVYGDYPKYNSFRERKSATEKVYFYSNIMNIFKKSISLADGRVIERPLIEVNEETGESVWNKESDLATVRRVLSYPQVNVVKKVEEQNHGLDRGKPKGLFNANLSSKPKPNSNENLVGAKEYLDPKKYGGYAGISNSFAVLVKGTIEKGAKKKITNVLEFQGISILDRINYRKDKLNFLLEKGYKDIELIIELPKYSLFELSDGSRRMLASILSTNNKRGEIHKGNQIFLSQKFVKLLYHAKRISNTINENHRKYVENHKKEFEELFYYILEFNENYVGAKKNGKLLNSAFQSWQNHSIDELCSSFIGPTGSERKGLFELTSRGSAADFEFLGVKIPRYRDYTPSSLLKDATLIHQSVTGLYETRIDLAKLGEG

SEQ ID NO: 19 - protein, 1228 aa, synthetic construct
MSKLEKFTNCYSLSKTLRFKAIPVGKTQENIDNKRLLVEDEKRAEDYKGVKKLLDRYYLSFINDVLHSIKLKNLNNYISLFRKKTRTEKENKELENLEINLRKEIAKAFKGNEGYKSLFKKDIIETILPEFLDDKDEIALVNSFNGFTTAFTGFFDNRENMFSEEAKSTSIAFRCINENLTRYISNMDIFEKVDAIFDKHEVQEIKEKILNSDYDVEDFFEGEFFNFVLTQEGIDVYNAIIGGFVTESGEKIKGLNEYINLYNQKTKQKLPKFKPLYKQVLSDRESLSFYGEGYTSDEEVLEVFRNTLNKNSEIFSSIKKLEKLFKNFDEYSSAGIFVKNGPAISTISKDIFGEWNVIRDKWNAEYDDIHLKKKAVVTEKYEDDRRKSFKKIGSFSLEQLQEYADADLSVVEKLKEIIIQKVDEIYKVYGSSEKLFDADFVLEKSLKKNDAVVAIMKDLLDSVKSFENYIKAFFGEGKETNRDESFYGDFVLAYDILLKVDHIYDAIRNYVTQKPYSKDKFKLYFQNPQFMGGWDKDKETDYRATILRYGSKYYLAIMDKKYAKCLQKIDKDDVNGNYEKINYKLLPGPNKMLPKVFFSKKWMAYYNPSEDIQKIYKNGTFKKGDMFNLNDCHKLIDFFKDSISRYPKWSNAYDFNFSETEKYKDIAGFYREVEEQGYKVSFESASKKEVDKLVEEGKLYMFQIYNKDFSDKSHGTPNLHTMYFKLLFDENNHGQIRLSGGAELFMRRASLKKEELVVHPANSPIANKNPDNPKKTTTLSYDVYKDKRFSEDQYELHIPIAINKCPKNIFKINTEVRVLLKHDDNPYVIGIARGERNLLYIVVVDGKGNIVEQYSLNEIINNFNGIRIKTDYHSLLDKKEKERFEARQNWTSIENIKELKAGYISQVVHKICELVEKYDAVIALEDLNSGFKNSRVKVEKQVYQKFEKMLIDKLNYMVDKKSNPCATGGALKGYQITNKFESFKSMSTQNGFIFYIPAWLTSKIDPSTGFVNLLKTKYTSIADSKKFISSFDRIMYVPEEDLFEFALDYKNFSRTDADYIKKWKLYSYGNRIRIFRNPKKNNVFDWEEVCLTSAYKELFNKYGINYQQGDIRALLCEQSDKAFYSSFMALMSLMLQMRNSITGRTDVDFLISPVKNSDGIFYDSRNYEAQENAILPKNADANGAYNIARKVLWAIGQFKKAEDEKLDKVKIAISNKEWLEYAQTSVKH

SEQ ID NO: 20 - protein, 1307 aa, synthetic construct
MTQFEGFTNLYQVSKTLRFELIPQGKTLKHIQEQGFIEEDKARNDHYKELKPIIDRIYKTYADQCLQLVQLDWENLSAAIDSYRKEKTEETRNALIEEQATYRNAIHDYFIGRTDNLTDAINKRHAEIYKGLFKAELFNGKVLKQLGTVTTTEHENALLRSFDKFTTYFSGFYENRKNVFSAEDISTAIPHRIVQDNFPKFKENCHIFTRLITAVPSLREHFENVKKAIGIFVSTSIEEVFSFPFYNQLLTQTQIDLYNQLLGGISREAGTEKIKGLNEVLNLAIQKNDETAHIIASLPHRFIPLFKQILSDRNTLSFILEEFKSDEEVIQSFCKYKTLLRNENVLETAEALFNELNSIDLTHIFISHKKLETISSALCDHWDTLRNALYERRISELTGKITKSAKEKVQRSLKHEDINLQEIISAAGKELSEAFKQKTSEILSHAHAALDQPLPTTLKKQEEKEILKSQLDSLLGLYHLLDWFAVDESNEVDPEFSARLTGIKLEMEPSLSFYNKARNYATKKPYSVEKFKLNFQMPTLASGWDVNKEKNNGAILFVKNGLYYLGIMPKQKGRYKALSFEPTEKTSEGFDKMYYDYFPDAAKMIPKCSTQLKAVTAHFQTHTTPILLSNNFIEPLEITKEIYDLNNPEKEPKKFQTAYAKKTGDQKGYREALCKWIDFTRDFLSKYTKTTSIDLSSLRPSSQYKDLGEYYAELNPLLYHISFQRIAEKEIMDAVETGKLYLFQIYNKDFAKGHHGKPNLHTLYWTGLFSPENLAKTSIKLNGQAELFYRPKSRMKRMAHRLGEKMLNKKLKDQKTPIPDTLYQELYDYVNHRLSHDLSDEARALLPNVITKEVSHEIIKDRRFTSDKFFFHVPITLNYQAANSPSKFNQRVNAYLKEHPETPIIGIARGERNLIYITVIDSTGKILEQRSLNTIQQFDYQKKLDNREKERVAARQAWSVVGTIKDLKQGYLSQVIHEIVDLMIHYQAVVVLENLNFGFKSKRTGIAEKAVYQQFEKMLIDKLNCLVLKDYPAEKVGGVLNPYQLTDQFTSFAKMGTQSGFLFYVPAPYTSKIDPLTGFVDPFVWKTIKNHESRKHFLEGFDFLHYDVKTGDFILHFKMNRNLSFQRGLPGFMPAWDIVFEKNETQFDAKGTPFIAGKRIVPVIENHRFTGRYRDLYPANELIALLEEKGIVFRDGSNILPKLLENDDSHAIDTMVALIRSVLQMRNSNAATGEDYINSPVRDLNGVCFDSRFQNPEWPMDADANGAYHIALKGQLLLNHLKESKDLKLQNGISNQDWLAYIQELRN

SEQ ID NO: 21 - protein, 1307 aa, synthetic construct
MTQFEGFTNLYQVSKTLRFELIPQGKTLKHIQEQGFIEEDKARNDHYKELKPIIDRIYKTYADQCLQLVQLDWENLSAAIDSYRKEKTEETRNALIEEQATYRNAIHDYFIGRTDNLTDAINKRHAEIYKGLFKAELFNGKVLKQLGTVTTTEHENALLRSFDKFTTYFSGFYRNRKNVFSAEDISTAIPHRIVQDNFPKFKENCHIFTRLITAVPSLREHFENVKKAIGIFVSTSIEEVFSFPFYNQLLTQTQIDLYNQLLGGISREAGTEKIKGLNEVLNLAIQKNDETAHIIASLPHRFIPLFKQILSDRNTLSFILEEFKSDEEVIQSFCKYKTLLRNENVLETAEALFNELNSIDLTHIFISHKKLETISSALCDHWDTLRNALYERRISELTGKITKSAKEKVQRSLKHEDINLQEIISAAGKELSEAFKQKTSEILSHAHAALDQPLPTTLKKQEEKEILKSQLDSLLGLYHLLDWFAVDESNEVDPEFSARLTGIKLEMEPSLSFYNKARNYATKKPYSVEKFKLNFQMPTLARGWDVNREKNNGAILFVKNGLYYLGIMPKQKGRYKALSFEPTEKTSEGFDKMYYDYFPDAAKMIPKCSTQLKAVTAHFQTHTTPILLSNNFIEPLEITKEIYDLNNPEKEPKKFQTAYAKKTGDQKGYREALCKWIDFTRDFLSKYTKTTSIDLSSLRPSSQYKDLGEYYAELNPLLYHISFQRIAEKEIMDAVETGKLYLFQIYNKDFAKGHHGKPNLHTLYWTGLFSPENLAKTSIKLNGQAELFYRPKSRMKRMAHRLGEKMLNKKLKDQKTPIPDTLYQELYDYVNHRLSHDLSDEARALLPNVITKEVSHEIIKDRRFTSDKFFFHVPITLNYQAANSPSKFNQRVNAYLKEHPETPIIGIARGERNLIYITVIDSTGKILEQRSLNTIQQFDYQKKLDNREKERVAARQAWSVVGTIKDLKQGYLSQVIHEIVDLMIHYQAVVVLENLNFGFKSKRTGIAEKAVYQQFEKMLIDKLNCLVLKDYPAEKVGGVLNPYQLTDQFTSFAKMGTQSGFLFYVPAPYTSKIDPLTGFVDPFVWKTIKNHESRKHFLEGFDFLHYDVKTGDFILHFKMNRNLSFQRGLPGFMPAWDIVFEKNETQFDAKGTPFIAGKRIVPVIENHRFTGRYRDLYPANELIALLEEKGIVFRDGSNILPKLLENDDSHAIDTMVALIRSVLQMRNSNAATGEDYINSPVRDLNGVCFDSRFQNPEWPMDADANGAYHIALKGQLLLNHLKESKDLKLQNGISNQDWLAYIQELRN

SEQ ID NO: 22 - protein, 1307 aa, synthetic construct
MTQFEGFTNLYQVSKTLRFELIPQGKTLKHIQEQGFIEEDKARNDHYKELKPIIDRIYKTYADQCLQLVQLDWENLSAAIDSYRKEKTEETRNALIEEQATYRNAIHDYFIGRTDNLTDAINKRHAEIYKGLFKAELFNGKVLKQLGTVTTTEHENALLRSFDKFTTYFSGFYRNRKNVFSAEDISTAIPHRIVQDNFPKFKENCHIFTRLITAVPSLREHFENVKKAIGIFVSTSIEEVFSFPFYNQLLTQTQIDLYNQLLGGISREAGTEKIKGLNEVLALAIQKNDETAHIIASLPHRFIPLFKQILSDRNTLSFILEEFKSDEEVIQSFCKYKTLLRNENVLETAEALFNELNSIDLTHIFISHKKLETISSALCDHWDTLRNALYERRISELTGKITKSAKEKVQRSLKHEDINLQEIISAAGKELSEAFKQKTSEILSHAHAALDQPLPTTLKKQEEKEILKSQLDSLLGLYHLLDWFAVDESNEVDPEFSARLTGIKLEMEPSLSFYNKARNYATKKPYSVEKFKLNFQMPTLARGWDVNREKNNGAILFVKNGLYYLGIMPKQKGRYKALSFEPTEKTSEGFDKMYYDYFPDAAKMIPKCSTQLKAVTAHFQTHTTPILLSNNFIEPLEITKEIYDLNNPEKEPKKFQTAYAKKTGDQKGYREALCKWIDFTRDFLSKYTKTTSIDLSSLRPSSQYKDLGEYYAELNPLLYHISFQRIAEKEIMDAVETGKLYLFQIYNKDFAKGHHGKPNLHTLYWTGLFSPENLAKTSIKLNGQAELFYRPKSRMKRMAHRLGEKMLNKKLKDQKTPIPDTLYQELYDYVNHRLSHDLSDEARALLPNVITKEVSHEIIKDRRFTSDKFFFHVPITLNYQAANSPSKFNQRVNAYLKEHPETPIIGIARGERNLIYITVIDSTGKILEQRSLNTIQQFDYQKKLDNREKERVAARQAWSVVGTIKDLKQGYLSQVIHEIVDLMIHYQAVVVLENLNFGFKSKRTGIAEKAVYQQFEKMLIDKLNCLVLKDYPAEKVGGVLNPYQLTDQFTSFAKMGTQSGFLFYVPAPYTSKIDPLTGFVDPFVWKTIKNHESRKHFLEGFDFLHYDVKTGDFILHFKMNRNLSFQRGLPGFMPAWDIVFEKNETQFDAKGTPFIAGKRIVPVIENHRFTGRYRDLYPANELIALLEEKGIVFRDGSNILPKLLENDDSHAIDTMVALIRSVLQMRNSNAATGEDYINSPVRDLNGVCFDSRFQNPEWPMDADANGAYHIALKGQLLLNHLKESKDLKLQNGISNQDWLAYIQELRN

SEQ ID NO: 23 - protein, 1307 aa, synthetic construct
MTQFEGFTNLYQVSKTLRFELIPQGKTLKHIQEQGFIEEDKARNDHYKELKPIIDRIYKTYADQCLQLVQLDWENLSAAIDSYRKEKTEETRNALIEEQATYRNAIHDYFIGRTDNLTDAINKRHAEIYKGLFKAELFNGKVLKQLGTVTTTEHENALLRSFDKFTTYFSGFYENRKNVFSAEDISTAIPHRIVQDNFPKFKENCHIFTRLITAVPSLREHFENVKKAIGIFVSTSIEEVFSFPFYNQLLTQTQIDLYNQLLGGISREAGTEKIKGLNEVLNLAIQKNDETAHIIASLPHRFIPLFKQILSDRNTLSFILEEFKSDEEVIQSFCKYKTLLRNENVLETAEALFNELNSIDLTHIFISHKKLETISSALCDHWDTLRNALYERRISELTGKITKSAKEKVQRSLKHEDINLQEIISAAGKELSEAFKQKTSEILSHAHAALDQPLPTTLKKQEEKEILKSQLDSLLGLYHLLDWFAVDESNEVDPEFSARLTGIKLEMEPSLSFYNKARNYATKKPYSVEKFKLNFQMPTLARGWDVNVEKNRGAILFVKNGLYYLGIMPKQKGRYKALSFEPTEKTSEGFDKMYYDYFPDAAKMIPKCSTQLKAVTAHFQTHTTPILLSNNFIEPLEITKEIYDLNNPEKEPKKFQTAYAKKTGDQKGYREALCKWIDFTRDFLSKYTKTTSIDLSSLRPSSQYKDLGEYYAELNPLLYHISFQRIAEKEIMDAVETGKLYLFQIYNKDFAKGHHGKPNLHTLYWTGLFSPENLAKTSIKLNGQAELFYRPKSRMKRMAHRLGEKMLNKKLKDQKTPIPDTLYQELYDYVNHRLSHDLSDEARALLPNVITKEVSHEIIKDRRFTSDKFFFHVPITLNYQAANSPSKFNQRVNAYLKEHPETPIIGIARGERNLIYITVIDSTGKILEQRSLNTIQQFDYQKKLDNREKERVAARQAWSVVGTIKDLKQGYLSQVIHEIVDLMIHYQAVVVLENLNFGFKSKRTGIAEKAVYQQFEKMLIDKLNCLVLKDYPAEKVGGVLNPYQLTDQFTSFAKMGTQSGFLFYVPAPYTSKIDPLTGFVDPFVWKTIKNHESRKHFLEGFDFLHYDVKTGDFILHFKMNRNLSFQRGLPGFMPAWDIVFEKNETQFDAKGTPFIAGKRIVPVIENHRFTGRYRDLYPANELIALLEEKGIVFRDGSNILPKLLENDDSHAIDTMVALIRSVLQMRNSNAATGEDYINSPVRDLNGVCFDSRFQNPEWPMDADANGAYHIALKGQLLLNHLKESKDLKLQNGISNQDWLAYIQELRN

SEQ ID NO: 24 - protein, 1307 aa, synthetic construct
MTQFEGFTNLYQVSKTLRFELIPQGKTLKHIQEQGFIEEDKARNDHYKELKPIIDRIYKTYADQCLQLVQLDWENLSAAIDSYRKEKTEETRNALIEEQATYRNAIHDYFIGRTDNLTDAINKRHAEIYKGLFKAELFNGKVLKQLGTVTTTEHENALLRSFDKFTTYFSGFYENRKNVFSAEDISTAIPHRIVQDNFPKFKENCHIFTRLITAVPSLREHFENVKKAIGIFVSTSIEEVFSFPFYNQLLTQTQIDLYNQLLGGISREAGTEKIKGLNEVLNLAIQKNDETAHIIASLPHRFIPLFKQILSDRNTLSFILEEFKSDEEVIQSFCKYKTLLRNENVLETAEALFNELNSIDLTHIFISHKKLETISSALCDHWDTLRNALYERRISELTGKITKSAKEKVQRSLKHEDINLQEIISAAGKELSEAFKQKTSEILSHAHAALDQPLPTTLKKQEEKEILKSQLDSLLGLYHLLDWFAVDESNEVDPEFSARLTGIKLEMEPSLSFYNKARNYATKKPYSVEKFKLNFQMPTLARGWDVNKEKNNGAILFVKNGLYYLGIMPKQKGRYKALSFEPTEKTSEGFDKMYYDYFPDAAKMIPRCSTQLKAVTAHFQTHTTPILLSNNFIEPLEITKEIYDLNNPEKEPKKFQTAYAKKTGDQKGYREALCKWIDFTRDFLSKYTKTTSIDLSSLRPSSQYKDLGEYYAELNPLLYHISFQRIAEKEIMDAVETGKLYLFQIYNKDFAKGHHGKPNLHTLYWTGLFSPENLAKTSIKLNGQAELFYRPKSRMKRMAHRLGEKMLNKKLKDQKTPIPDTLYQELYDYVNHRLSHDLSDEARALLPNVITKEVSHEIIKDRRFTSDKFFFHVPITLNYQAANSPSKFNQRVNAYLKEHPETPIIGIARGERNLIYITVIDSTGKILEQRSLNTIQQFDYQKKLDNREKERVAARQAWSVVGTIKDLKQGYLSQVIHEIVDLMIHYQAVVVLENLNFGFKSKRTGIAEKAVYQQFEKMLIDKLNCLVLKDYPAEKVGGVLNPYQLTDQFTSFAKMGTQSGFLFYVPAPYTSKIDPLTGFVDPFVWKTIKNHESRKHFLEGFDFLHYDVKTGDFILHFKMNRNLSFQRGLPGFMPAWDIVFEKNETQFDAKGTPFIAGKRIVPVIENHRFTGRYRDLYPANELIALLEEKGIVFRDGSNILPKLLENDDSHAIDTMVALIRSVLQMRNSNAATGEDYINSPVRDLNGVCFDSRFQNPEWPMDADANGAYHIALKGQLLLNHLKESKDLKLQNGISNQDWLAYIQELRN

SEQ ID NO: 25 - protein, 986 aa, synthetic construct
MEKRINKIRKKLSADNATKPVSRSGPMKTLLVRVMTDDLKKRLEKRRKKPEVMPQVISNNAANNLRMLLDDYTKMKEAILQVYWQEFKDDHVGLMCKFAQPASKKIDQNKLKPEMDEKGNLTTAGFACSQCGQPLFVYKLEQVSEKGKAYTNYFGRCNVAEHEKLILLAQLKPEKDSDEAVTYSLGKFGQRALDFYSIHVTKESTHPVKPLAQIAGNRYASGPVGKALSDACMGTIASFLSKYQDIIIEHQKVVKGNQKRLESLRELAGKENLEYPSVTLPPQPHTKEGVDAYNEVIARVRMWVNLNLWQKLKLSRDDAKPLLRLKGFPSFPVVERRENEVDWWNTINEVKKLIDAKRDMGRVFWSGVTAEKRNTILEGYNYLPNENDHKKREGSLENPKKPAKRQFGDLLLYLEKKYAGDWGKVFDEAWERIDKKIAGLTSHIEREEARNAEDAQSKAVLTDWLRAKASFVLERLKEMDEKEFYACEIQLQKWYGDLRGNPFAVEAENRVVDISGFSIGSDGHSIQYRNLLAWKYLENGKREFYLLMNYGKKGRIRFTDGTDIKKSGKWQGLLYGGGKAKVIDLTFDPDDEQLIILPLAFGTRQGREFIWNDLLSLETGLIKLANGRVIEKTIYNKKIGRDEPALFVALTFERREVVDPSNIKPVNLIGVARGENIPAVIALTDPEGCPLPEFKDSSGGPTDILRIGEGYKEKQRAIQAAKEVEQRRAGGYSRKFASKSRNLADDMVRNSARDLFYHAVTHDAVLVFANLSRGFGRQGKRTFMTERQYTKMEDWLTAKLAYEGLTSKTYLSKTLAQYTSKTCSNCGFTITTADYDGMLVRLKKTSDGWATTLNNKELKAEGQITYYNRYKRQTVEKELSAELDRLSEESGNNDISKWTKGRRDEALFLLKKRFSHRPVQEQFVCLDCGHEVHAAEQAALNIARSWLFLNSNSTEFKSYKSGKQPFVGAWQAFYKRRLKEVWKPNA

SEQ ID NO: 26 - protein, 757 aa, synthetic construct
MPKPAVESEFSKVLKKHFPGERFRSSYMKRGGKILAAQGEEAVVAYLQGKSEEEPPNFQPPAKCHVVTKSRDFAEWPIMKASEAIQRYIYALSTTERAACKPGKSSESHAAWFAATGVSNHGYSHVQGLNLIFDHTLGRYDGVLKKVQLRNEKARARLESINASRADEGLPEIKAEEEEVATNETGHLLQPPGINPSFYVYQTISPQAYRPRDEIVLPPEYAGYVRDPNAPIPLGVVRNRCDIQKGCPGYIPEWQREAGTAISPKTGKAVTVPGLSPKKNKRMRRYWRSEKEKAQDALLVTVRIGTDWVVIDVRGLLRNARWRTIAPKDISLNALLDLFTGDPVIDVRRNIVTFTYTLDACGTYARKWTLKGKQTKATLDKLTATQTVALVAIALGQTNPISAGISRVTQENGALQCEPLDRFTLPDDLLKDISAYRIAWDRNEEELRARSVEALPEAQQAEVRALDGVSKETARTQLCADFGLDPKRLPWDKMSSNTTFISEALLSNSVSRDQVFFTPAPKKGAKKKAPVEVMRKDRTWARAYKPRLSVEAQKLKNEALWALKRTSPEYLKLSRRKEELCRRSINYVIEKTRRRTQCQIVIPVIEDLNVRFFHGSGKRLPGWDNFFTAKKENRWFIQGLHKAFSDLRTHRSFYVFEVRPERTSITCPKCGHCEVGNRDGEAFQCLSCGKTCNADLDVATHNLTQVALTGKTMPKREEPRDAQGTAPARKTKKASKSKAPPAEREDQTPAQEPSQTS

SEQ ID NO: 27 - protein, 1368 aa, synthetic construct
MDKKYSIGLAIGTNSVGWAVITDEYKVPSKKFKVLGNTDRHSIKKNLIGALLFDSGETAEATRLKRTARRRYTRRKNRICYLQEIFSNEMAKVDDSFFHRLEESFLVEEDKKHERHPIFGNIVDEVAYHEKYPTIYHLRKKLVDSTDKADLRLIYLALAHMIKFRGHFLIEGDLNPDNSDVDKLFIQLVQTYNQLFEENPINASGVDAKAILSARLSKSRRLENLIAQLPGEKKNGLFGNLIALSLGLTPNFKSNFDLAEDAKLQLSKDTYDDDLDNLLAQIGDQYADLFLAAKNLSDAILLSDILRVNTEITKAPLSASMIKRYDEHHQDLTLLKALVRQQLPEKYKEIFFDQSKNGYAGYIDGGASQEEFYKFIKPILEKMDGTEELLVKLNREDLLRKQRTFDNGSIPHQIHLGELHAILRRQEDFYPFLKDNREKIEKILTFRIPYYVGPLARGNSRFAWMTRKSEETITPWNFEEVVDKGASAQSFIERMTNFDKNLPNEKVLPKHSLLYEYFTVYNELTKVKYVTEGMRKPAFLSGEQKKAIVDLLFKTNRKVTVKQLKEDYFKKIECFDSVEISGVEDRFNASLGTYHDLLKIIKDKDFLDNEENEDILEDIVLTLTLFEDREMIEERLKTYAHLFDDKVMKQLKRRRYTGWGRLSRKLINGIRDKQSGKTILDFLKSDGFANRNFMQLIHDDSLTFKEDIQKAQVSGQGDSLHEHIANLAGSPAIKKGILQTVKVVDELVKVMGRHKPENIVIEMARENQTTQKGQKNSRERMKRIEEGIKELGSQILKEHPVENTQLQNEKLYLYYLQNGRDMYVDQELDINRLSDYDVDAIVPQSFLKDDSIDNKVLTRSDKNRGKSDNVPSEEVVKKMKNYWRQLLNAKLITQRKFDNLTKAERGGLSELDKAGFIKRQLVETRQITKHVAQILDSRMNTKYDENDKLIREVKVITLKSKLVSDFRKDFQFYKVREINNYHHAHDAYLNAVVGTALIKKYPKLESEFVYGDYKVYDVRKMIAKSEQEIGKATAKYFFYSNIMNFFKTEITLANGEIRKRPLIETNGETGEIVWDKGRDFATVRKVLSMPQVNIVKKTEVQTGGFSKESILPKRNSDKLIARKKDWDPKKYGGFVSPTVAYSVLVVAKVEKGKSKKLKSVKELLGITIMERSSFEKNPIDFLEAKGYKEVKKDLIIKLPKYSLFELENGRKRMLASARELQKGNELALPSKYVNFLYLASHYEKLKGSPEDNEQKQLFVEQHKHYLDEIIEQISEFSKRVILADANLDKVLSAYNKHRDKPIREQAENIIHLFTLTNLGAPAAFKYFDTTIDRKEYRSTKEVLDATLIHQSITGLYETRIDLSQLGGD

SEQ ID NO: 28 - protein, 1368 aa, synthetic construct
MDKKYSIGLAIGTNSVGWAVITDEYKVPSKKFKVLGNTDRHSIKKNLIGALLFDSGETAEATRLKRTARRRYTRRKNRICYLQEIFSNEMAKVDDSFFHRLEESFLVEEDKKHERHPIFGNIVDEVAYHEKYPTIYHLRKKLVDSTDKADLRLIYLALAHMIKFRGHFLIEGDLNPDNSDVDKLFIQLVQTYNQLFEENPINASGVDAKAILSARLSKSRRLENLIAQLPGEKKNGLFGNLIALSLGLTPNFKSNFDLAEDAKLQLSKDTYDDDLDNLLAQIGDQYADLFLAAKNLSDAILLSDILRVNTEITKAPLSASMIKRYDEHHQDLTLLKALVRQQLPEKYKEIFFDQSKNGYAGYIDGGASQEEFYKFIKPILEKMDGTEELLVKLNREDLLRKQRTFDNGSIPHQIHLGELHAILRRQEDFYPFLKDNREKIEKILTFRIPYYVGPLARGNSRFAWMTRKSEETITPWNFEEVVDKGASAQSFIERMTNFDKNLPNEKVLPKHSLLYEYFTVYNELTKVKYVTEGMRKPAFLSGEQKKAIVDLLFKTNRKVTVKQLKEDYFKKIECFDSVEISGVEDRFNASLGTYHDLLKIIKDKDFLDNEENEDILEDIVLTLTLFEDREMIEERLKTYAHLFDDKVMKQLKRRRYTGWGRLSRKLINGIRDKQSGKTILDFLKSDGFANRNFMQLIHDDSLTFKEDIQKAQVSGQGDSLHEHIANLAGSPAIKKGILQTVKVVDELVKVMGRHKPENIVIEMARENQTTQKGQKNSRERMKRIEEGIKELGSQILKEHPVENTQLQNEKLYLYYLQNGRDMYVDQELDINRLSDYDVDAIVPQSFLKDDSIDNKVLTRSDKNRGKSDNVPSEEVVKKMKNYWRQLLNAKLITQRKFDNLTKAERGGLSELDKAGFIKRQLVETRQITKHVAQILDSRMNTKYDENDKLIREVKVITLKSKLVSDFRKDFQFYKVREINNYHHAHDAYLNAVVGTALIKKYPKLESEFVYGDYKVYDVRKMIAKSEQEIGKATAKYFFYSNIMNFFKTEITLANGEIRKRPLIETNGETGEIVWDKGRDFATVRKVLSMPQVNIVKKTEVQTGGFSKESILPKRNSDKLIARKKDWDPKKYGGFESPTVAYSVLVVAKVEKGKSKKLKSVKELLGITIMERSSFEKNPIDFLEAKGYKEVKKDLIIKLPKYSLFELENGRKRMLASAGELQKGNELALPSKYVNFLYLASHYEKLKGSPEDNEQKQLFVEQHKHYLDEIIEQISEFSKRVILADANLDKVLSAYNKHRDKPIREQAENIIHLFTLTNLGAPAAFKYFDTTIDRKQYRSTKEVLDATLIHQSITGLYETRIDLSQLGGD

SEQ ID NO: 29 - protein, 1368 aa, synthetic construct
MDKKYSIGLAIGTNSVGWAVITDEYKVPSKKFKVLGNTDRHSIKKNLIGALLFDSGETAEATRLKRTARRRYTRRKNRICYLQEIFSNEMAKVDDSFFHRLEESFLVEEDKKHERHPIFGNIVDEVAYHEKYPTIYHLRKKLVDSTDKADLRLIYLALAHMIKFRGHFLIEGDLNPDNSDVDKLFIQLVQTYNQLFEENPINASGVDAKAILSARLSKSRRLENLIAQLPGEKKNGLFGNLIALSLGLTPNFKSNFDLAEDAKLQLSKDTYDDDLDNLLAQIGDQYADLFLAAKNLSDAILLSDILRVNTEITKAPLSASMIKRYDEHHQDLTLLKALVRQQLPEKYKEIFFDQSKNGYAGYIDGGASQEEFYKFIKPILEKMDGTEELLVKLNREDLLRKQRTFDNGSIPHQIHLGELHAILRRQEDFYPFLKDNREKIEKILTFRIPYYVGPLARGNSRFAWMTRKSEETITPWNFEEVVDKGASAQSFIERMTNFDKNLPNEKVLPKHSLLYEYFTVYNELTKVKYVTEGMRKPAFLSGEQKKAIVDLLFKTNRKVTVKQLKEDYFKKIECFDSVEISGVEDRFNASLGTYHDLLKIIKDKDFLDNEENEDILEDIVLTLTLFEDREMIEERLKTYAHLFDDKVMKQLKRRRYTGWGRLSRKLINGIRDKQSGKTILDFLKSDGFANRNFMQLIHDDSLTFKEDIQKAQVSGQGDSLHEHIANLAGSPAIKKGILQTVKVVDELVKVMGRHKPENIVIEMARENQTTQKGQKNSRERMKRIEEGIKELGSQILKEHPVENTQLQNEKLYLYYLQNGRDMYVDQELDINRLSDYDVDAIVPQSFLKDDSIDNKVLTRSDKNRGKSDNVPSEEVVKKMKNYWRQLLNAKLITQRKFDNLTKAERGGLSELDKAGFIKRQLVETRQITKHVAQILDSRMNTKYDENDKLIREVKVITLKSKLVSDFRKDFQFYKVREINNYHHAHDAYLNAVVGTALIKKYPKLESEFVYGDYKVYDVRKMIAKSEQEIGKATAKYFFYSNIMNFFKTEITLANGEIRKRPLIETNGETGEIVWDKGRDFATVRKVLSMPQVNIVKKTEVQTGGFSKESILPKRNSDKLIARKKDWDPKKYGGFVSPTVAYSVLVVAKVEKGKSKKLKSVKELLGITIMERSSFEKNPIDFLEAKGYKEVKKDLIIKLPKYSLFELENGRKRMLASAGELQKGNELALPSKYVNFLYLASHYEKLKGSPEDNEQKQLFVEQHKHYLDEIIEQISEFSKRVILADANLDKVLSAYNKHRDKPIREQAENIIHLFTLTNLGAPAAFKYFDTTIDRKQYRSTKEVLDATLIHQSITGLYETRIDLSQLGGD

SEQ ID NO: 30 - protein, 1368 aa, synthetic construct
MDKKYSIGLAIGTNSVGWAVITDEYKVPSKKFKVLGNTDRHSIKKNLIGALLFDSGETAEATRLKRTARRRYTRRKNRICYLQEIFSNEMAKVDDSFFHRLEESFLVEEDKKHERHPIFGNIVDEVAYHEKYPTIYHLRKKLVDSTDKADLRLIYLALAHMIKFRGHFLIEGDLNPDNSDVDKLFIQLVQTYNQLFEENPINASGVDAKAILSARLSKSRRLENLIAQLPGEKKNGLFGNLIALSLGLTPNFKSNFDLAEDAKLQLSKDTYDDDLDNLLAQIGDQYADLFLAAKNLSDAILLSDILRVNTEITKAPLSASMIKRYDEHHQDLTLLKALVRQQLPEKYKEIFFDQSKNGYAGYIDGGASQEEFYKFIKPILEKMDGTEELLVKLNREDLLRKQRTFDNGSIPHQIHLGELHAILRRQEDFYPFLKDNREKIEKILTFRIPYYVGPLARGNSRFAWMTRKSEETITPWNFEEVVDKGASAQSFIERMTNFDKNLPNEKVLPKHSLLYEYFTVYNELTKVKYVTEGMRKPAFLSGEQKKAIVDLLFKTNRKVTVKQLKEDYFKKIECFDSVEISGVEDRFNASLGTYHDLLKIIKDKDFLDNEENEDILEDIVLTLTLFEDREMIEERLKTYAHLFDDKVMKQLKRRRYTGWGRLSRKLINGIRDKQSGKTILDFLKSDGFANRNFMQLIHDDSLTFKEDIQKAQVSGQGDSLHEHIANLAGSPAIKKGILQTVKVVDELVKVMGRHKPENIVIEMARENQTTQKGQKNSRERMKRIEEGIKELGSQILKEHPVENTQLQNEKLYLYYLQNGRDMYVDQELDINRLSDYDVDAIVPQSFLKDDSIDNKVLTRSDKNRGKSDNVPSEEVVKKMKNYWRQLLNAKLITQRKFDNLTKAERGGLSELDKAGFIKRQLVETRQITKHVAQILDSRMNTKYDENDKLIREVKVITLKSKLVSDFRKDFQFYKVREINNYHHAHDAYLNAVVGTALIKKYPKLESEFVYGDYKVYDVRKMIAKSEQEIGKATAKYFFYSNIMNFFKTEITLANGEIRKRPLIETNGETGEIVWDKGRDFATVRKVLSMPQVNIVKKTEVQTGGFSKESILPKRNSDKLIARKKDWDPKKYGGFLWPTVAYSVLVVAKVEKGKSKKLKSVKELLGITIMERSSFEKNPIDFLEAKGYKEVKKDLIIKLPKYSLFELENGRKRMLASAKQLQKGNELALPSKYVNFLYLASHYEKLKGSPEDNEQKQLFVEQHKHYLDEIIEQISEFSKRVILADANLDKVLSAYNKHRDKPIREQAENIIHLFTLTNLGAPAAFKYFDTTIDRKQYRSTKEVLDATLIHQSITGLYETRIDLSQLGGD

SEQ ID NO: 31 - protein, 1368 aa, synthetic construct
MDKKYSIGLAIGTNSVGWAVITDEYKVPSKKFKVLGNTDRHSIKKNLIGALLFDSGETAERTRLKRTARRRYTRRKNRICYLQEIFSNEMAKVDDSFFHRLEESFLVEEDKKHERHPIFGNIVDEVAYHEKYPTIYHLRKKLVDSTDKADLRLIYLALAHMIKFRGHFLIEGDLNPDNSDVDKLFIQLVQTYNQLFEENPINASGVDAKAILSARLSKSRRLENLIAQLPGEKKNGLFGNLIALSLGLTPNFKSNFDLAEDAKLQLSKDTYDDDLDNLLAQIGDQYADLFLAAKNLSDAILLSDILRVNTEITKAPLSASMIKRYDEHHQDLTLLKALVRQQLPEKYKEIFFDQSKNGYAGYIDGGASQEEFYKFIKPILEKMDGTEELLVKLNREDLLRKQRTFDNGSIPHQIHLGELHAILRRQEDFYPFLKDNREKIEKILTFRIPYYVGPLARGNSRFAWMTRKSEETITPWNFEEVVDKGASAQSFIERMTNFDKNLPNEKVLPKHSLLYEYFTVYNELTKVKYVTEGMRKPAFLSGEQKKAIVDLLFKTNRKVTVKQLKEDYFKKIECFDSVEISGVEDRFNASLGTYHDLLKIIKDKDFLDNEENEDILEDIVLTLTLFEDREMIEERLKTYAHLFDDKVMKQLKRRRYTGWGRLSRKLINGIRDKQSGKTILDFLKSDGFANRNFMQLIHDDSLTFKEDIQKAQVSGQGDSLHEHIANLAGSPAIKKGILQTVKVVDELVKVMGRHKPENIVIEMARENQTTQKGQKNSRERMKRIEEGIKELGSQILKEHPVENTQLQNEKLYLYYLQNGRDMYVDQELDINRLSDYDVDAIVPQSFLKDDSIDNKVLTRSDKNRGKSDNVPSEEVVKKMKNYWRQLLNAKLITQRKFDNLTKAERGGLSELDKAGFIKRQLVETRQITKHVAQILDSRMNTKYDENDKLIREVKVITLKSKLVSDFRKDFQFYKVREINNYHHAHDAYLNAVVGTALIKKYPKLESEFVYGDYKVYDVRKMIAKSEQEIGKATAKYFFYSNIMNFFKTEITLANGEIRKRPLIETNGETGEIVWDKGRDFATVRKVLSMPQVNIVKKTEVQTGGFSKESIRPKRNSDKLIARKKDWDPKKYGGFLWPTVAYSVLVVAKVEKGKSKKLKSVKELLGITIMERSSFEKNPIDFLEAKGYKEVKKDLIIKLPKYSLFELENGRKRMLASAKQLQKGNELALPSKYVNFLYLASHYEKLKGSPEDNEQKQLFVEQHKHYLDEIIEQISEFSKRVILADANLDKVLSAYNKHRDKPIREQAENIIHLFTLTRLGAPRAFKYFDTTIDPKQYRSTKEVLDATLIHQSITGLYETRIDLSQLGGD

SEQ ID NO: 32 - protein, 1053 aa, synthetic construct
MKRNYILGLAIGITSVGYGIIDYETRDVIDAGVRLFKEANVENNEGRRSKRGARRLKRRRRHRIQRVKKLLFDYNLLTDHSELSGINPYEARVKGLSQKLSEEEFSAALLHLAKRRGVHNVNEVEEDTGNELSTKEQISRNSKALEEKYVAELQLERLKKDGEVRGSINRFKTSDYVKEAKQLLKVQKAYHQLDQSFIDTYIDLLETRRTYYEGPGEGSPFGWKDIKEWYEMLMGHCTYFPEELRSVKYAYNADLYNALNDLNNLVITRDENEKLEYYEKFQIIENVFKQKKKPTLKQIAKEILVNEEDIKGYRVTSTGKPEFTNLKVYHDIKDITARKEIIENAELLDQIAKILTIYQSSEDIQEELTNLNSELTQEEIEQISNLKGYTGTHNLSLKAINLILDELWHTNDNQIAIFNRLKLVPKKVDLSQQKEIPTTLVDDFILSPVVKRSFIQSIKVINAIIKKYGLPNDIIIELAREKNSKDAQKMINEMQKRNRQTNERIEEIIRTTGKENAKYLIEKIKLHDMQEGKCLYSLEAIPLEDLLNNPFNYEVDHIIPRSVSFDNSFNNKVLVKQEEASKKGNRTPFQYLSSSDSKISYETFKKHILNLAKGKGRISKTKKEYLLEERDINRFSVQKDFINRNLVDTRYATRGLMNLLRSYFRVNNLDVKVKSINGGFTSFLRRKWKFKKERNKGYKHHAEDALIIANADFIFKEWKKLDKAKKVMENQMFEEKQAESMPEIETEQEYKEIFITPHQIKHIKDFKDYKYSHRVDKKPNRKLINDTLYSTRKDDKGNTLIVNNLNGLYDKDNDKLKKLINKSPEKLLMYHHDPQTYQKLKLIMEQYGDEKNPLYKYYEETGNYLTKYSKKDNGPVIKKIKYYGNKLNAHLDITDDYPNSRNKVVKLSLKPYRFDVYLDNGVYKFVTVKNLDVIKKENYYEVNSKCYEEAKKLKKISNQAEFIASFYKNDLIKINGELYRVIGVNNDLLNRIEVNMIDITYREYLENMNDKRPPHIIKTIASKTQSIKKYSTDILGNLYEVKSKKHPQIIKKG

SEQ ID NO: 33 - protein, 100 aa, synthetic construct
MNNSQGRVTFEDVTVNFTQGEWQRLNPEQRNLYRDVMLENYSNLVSVGQGETTKPDVILRLEQGKEPWLEEEEVLGSGRAEKNGDIGGQIWKPKDVKESL

SEQ ID NO: 34 - protein, 106 aa, synthetic construct
MAATLLMAGSQAPVTFEDMAMYLTREEWRPLDAAQRDLYRDVMQENYGNVVSLDFEIRSENEVNPKQEISEDVQFGTTSERPAENAEENPESEEGFESGDRSERQW

SEQ ID NO: 35 - protein, 95 aa, synthetic construct
MLENYRNLVFLGIAVSKPDLITCLEQGKEPCNMKRHEMVAKPPVMCSHIAEDLCPERDIKYFFQKVILRRYDKCEHENLQLRKGCKSVDECKVCK

SEQ ID NO: 36 - protein, 95 aa, synthetic construct
MGLLTFRDVAIEFSLEEWQCLDTAQRNLYKNVILENYRNLVFLGIAVSKQDLITCLEQEKEPLTVKRHEMVNEPPVMCSHFAQEFWPEQNIKDSF

SEQ ID NO: 37 - protein, 116 aa, synthetic construct
MLQMQNSEHHGQSIKTQTDSISLEDVAVNFTLEEWALLDPGQRNIYRDVMRATFKNLACIGEKWKDQDIEDEHKNQGRNLRSPMVEALCENKEDCPCGKSTSQIPDLNTNLETPTG

SEQ ID NO: 38 - protein, 100 aa, synthetic construct
MALSQGLLTFRDVAIEFSQEEWKCLDPAQRTLYRDVMLENYRNLVSLDISSKCMMNTLSSTGQGNTEVIHTGTLQRQASYHIGAFCSQEIEKDIHDFVFQ

SEQ ID NO: 39 - protein, 98 aa, synthetic construct
MAQGLVTFADVAIDFSQEEWACLNSAQRDLYWDVMLENYSNLVSLDLESAYENKSLPTKKNIHEIRASKRNSDRRSKSLGRNWICEGTLERPQRSRGR

SEQ ID NO: 40 - protein, 118 aa, synthetic construct
MLREEATKKSKEKEPGMALPQGRLTFRDVAIEFSLEEWKCLNPAQRALYRAVMLENYRNLEFVDSSLKSMMEFSSTRHSITGEVIHTGTLQRHKSHHIGDFCFPEMKKDIHHFEFQWQ

SEQ ID NO: 41 - protein, 104 aa, synthetic construct
MPGPPGSLEMGPLTFRDVAIEFSLEEWQCLDTAQRNLYRKVMFENYRNLVFLGIAVSKPHLITCLEQGKEPWNRKRQEMVAKPPVIYSHFTEDLWPEHSIKDSF

SEQ ID NO: 42 - protein, 113 aa, synthetic construct
MSPPWSPALAAEGRGSSCEASVSFEDVTVDFSKEEWQHLDPAQRRLYWDVTLENYSHLLSVGYQIPKSEAAFKLEQGEGPWMLEGEAPHQSCSGEAIGKMQQQGIPGGIFFHC

SEQ ID NO: 43 - protein, 109 aa, synthetic construct
MASPSPPPESKEEWDYLDPAQRSLYKDVMMENYGNLVSLDVLNRDKDEEPTVKQEIEEIEEEVEPQGVIVTRIKSEIDQDPMGRETFELVGRLDKQRGIFLWEIPRESL

SEQ ID NO: 44 - protein, 99 aa, synthetic construct
MALTQGPLKFMDVAIEFSQEEWKCLDPAQRTLYRDVMLENYRNLVSLGICLPDLSVTSMLEQKRDPWTLQSEEKIANDPDGRECIKGVNTERSSKLGSN

SEQ ID NO: 45 - protein, 100 aa, synthetic construct
MAASAQVSVTFEDVAVTFTQEEWGQLDAAQRTLYQEVMLETCGLLMSLGCPLFKPELIYQLDHRQELWMATKDLSQSSYPGDNTKPKTTEPTFSHLALPE

SEQ ID NO: 46 - protein, 144 aa, synthetic construct
MFSQEERMAAGYLPRWSQELVTFEDVSMDFSQEEWELLEPAQKNLYREVMLENYRNVVSLEALKNQCTDVGIKEGPLSPAQTSQVTSLSSWTGYLLFQPVASSHLEQREALWIEEKGTPQASCSDWMTVLRNQDSTYKKVALQE

SEQ ID NO: 47 - protein, 97 aa, synthetic construct
MSQGSVTFRDVAIDFSQEEWKWLQPAQRDLYRCVMLENYGHLVSLGLSISKPDVVSLLEQGKEPWLGKREVKRDLFSVSESSGEIKDFSPKNVIYDD

SEQ ID NO: 48 - protein, 112 aa, synthetic construct
MEEAQKRKAKESGMALPQGRLTFMDVAIEFSQEEWKSLDPGQRALYRDVMLENYRNLVFLGRSCVLGSNAENKPIKNQLGLTLESHLSELQLFQAGRKIYRSNQVEKFTNHR

SEQ ID NO: 49 - protein, 105 aa, synthetic construct
MAAAVLTDRAQVSVTFDDVAVTFTKEEWGQLDLAQRTLYQEVMLENCGLLVSLGCPVPKAELICHLEHGQEPWTRKEDLSQDTCPGDKGKPKTTEPTTCEPALSE

SEQ ID NO: 50 - protein, 99 aa, synthetic construct
MIQAQESITLEDVAVDFTWEEWQLLGAAQKDLYRDVMLENYSNLVAVGYQASKPDALFKLEQGEQLWTIEDGIHSGACSDIWKVDHVLERLQSESLVNR

SEQ ID NO: 51 - protein, 112 aa, synthetic construct
MEGVAGVMSVGPPAARLQEPVTFRDVAVDFTQEEWGQLDPTQRILYRDVMLETFGHLLSIGPELPKPEVISQLEQGTELWVAERGTTQGCHPAWEPRSESQASRKEEGLPEE

SEQ ID NO: 52 - protein, 97 aa, synthetic construct
MSLGSELFRDVAIVFSQEEWQWLAPAQRDLYRDVMLETYSNLVSLGLAVSKPDVISFLEQGKEPWMVERVVSGGLCPVLESRYDTKELFPKQHVYEV

SEQ ID NO: 53 - protein, 105 aa, synthetic construct
MAHKYVGLQYHGSVTFEDVAIAFSQQEWESLDSSQRGLYRDVMLENYRNLVSMAGHSRSKPHVIALLEQWKEPEVTVRKDGRRWCTDLQLEDDTIGCKEMPTSEN

SEQ ID NO: 54 - protein, 92 aa, synthetic construct
MAFEDVAVYFSQEEWGLLDTAQRALYRRVMLDNFALVASLGLSTSRPRVVIQLERGEEPWVPSGTDTTLSRTTYRRRNPGSWSLTEDRDVSG

SEQ ID NO: 55 - protein, 104 aa, synthetic construct
MLENYRNLVFVGIAASKPDLITCLEQGKEPWNVKRHEMVTEPPVVYSYFAQDLWPKQGKKNYFQKVILRTYKKCGRENLQLRKYCKSMDECKVHKECYNGLNQC

SEQ ID NO: 56 - protein, 127 aa, synthetic construct
MHFRRPDPCREPLASPIQDSVAFEDVAVNFTQEEWALLDSSQKNLYREVMQETCRNLASVGSQWKDQNIEDHFEKPGKDIRNHIVQRLCESKEDGQYGEVVSQIPNLDLNENISTGLKPCECSICGK

SEQ ID NO: 57 - protein, 110 aa, synthetic construct
MALSQGLFTFKDVAIEFSQEEWECLDPAQRALYRDVMLENYRNLLSLDEDNIPPEDDISVGFTSKGLSPKENNKEELYHLVILERKESHGINNFDLKEVWENMPKFDSLW

SEQ ID NO: 58 - protein, 98 aa, synthetic construct
MTFEDIIVDFTQEEWALLDTSQRKLFQDVMLENISHLVSIGKQLCKSVVLSQLEQVEKLSTQRISLLQGREVGIKHQEIPFIHHIYQKGTSTISTMRS

SEQ ID NO: 59 - protein, 103 aa, synthetic construct
MAVTFEDVTIIFTWEEWKFLDSSQKRLYREVMWENYTNVMSVENWNESYKSQEEKFRYLEYENFSYWQGWWNAGAQMYENQNYGETVQGTDSKDLTQQDRSQC

SEQ ID NO: 60 - protein, 99 aa, synthetic construct
MITSQGSVSFRDVTVGFTQEEWQHLDPAQRTLYRDVMLENYSHLVSVGYCIPKPEVILKLEKGEEPWILEEKFPSQSHLELINTSRNYSIMKFNEFNKG

SEQ ID NO: 61 - protein, 114 aa, synthetic construct
MFEDVAVYLSREEWGRLGPAQRGLYRDVMLETYGNLVSLGVGPAGPKPGVISQLERGDEPWVLDVQGTSGKEHLRVNSPALGTRTEYKELTSQETFGEEDPQGSEPVEACDHIS

SEQ ID NO: 62 - protein, 112 aa, synthetic construct
METYGNVVSLGLPGSKPDIISQLERGEDPWVLDRKGAKKSQGLWSDYSDNLKYDHTTACTQQDSLSCPWECETKGESQNTDLSPKPLISEQTVILGKTPLGRIDQENNETKQ

SEQ ID NO: 63 - protein, 102 aa, synthetic construct
MAEMNPAQGHVVFEDVAIYFSQEEWGHLDEAQRLLYRDVMLENLALLSSLGCCHGAEDEEAPLEPGVSVGVSQVMAPKPCLSTQNTQPCETCSSLLKDILRL

SEQ ID NO: 64 - protein, 62 aa, synthetic construct
MLDNYRNLVFLGIAVSKPDLITCLEQGKEPCNMKRHAMVAKPPVVCSHFAQDLWPKQGLKDS

SEQ ID NO: 65 - protein, 105 aa, synthetic construct
MAAGQREARPQVSLTFEDVAVLFTRDEWRKLAPSQRNLYRDVMLENYRNLVSLGLPFTKPKVISLLQQGEDPWEVEKDGSGVSSLGSKSSHKTTKSTQTQDSSFQ

SEQ ID NO: 66 - protein, 97 aa, synthetic construct
MALRSVMFSDVSIDFSPEEWEYLDLEQKDLYRDVMLENYSNLVSLGCFISKPDVISSLEQGKEPWKVVRKGRRQYPDLETKYETKKLSLENDIYEIN

SEQ ID NO: 67 - protein, 98 aa, synthetic construct
MTTFKEAMTFKDVAVVFTEEELGLLDLAQRKLYRDVMLENFRNLLSVGHQAFHRDTFHFLREEKIWMMKTAIQREGNSGDKIQTEMETVSEAGTHQEW

SEQ ID NO: 68 - protein, 103 aa, synthetic construct
MFQVEQKSQESVSFKDVTVGFTQEEWQHLDPSQRALYRDVMLENYSNLVSVGYCVHKPEVIFRLQQGEEPWKQEEEFPSQSFPEVWTADHLKERSQENQSKHL

SEQ ID NO: 69 - protein, 98 aa, synthetic construct
MTKSKEAVTFKDVAVVFSEEELQLLDLAQRKLYRDVMLENFRNVVSVGHQSTPDGLPQLEREEKLWMMKMATQRDNSSGAKNLKEMETLQEVGLRYLP

SEQ ID NO: 70 - protein, 112 aa, synthetic construct
MSQKPQVLGPEKQDGSCEASVSFEDVTVDFSREEWQQLDPAQRCLYRDVMLELYSHLFAVGYHIPNPEVIFRMLKEKEPRVEEAEVSHQRCQEREFGLEIPQKEISKKASFQ

SEQ ID NO: 71 - protein, 95 aa, synthetic construct
MELVTFRDVAIEFSPEEWKCLDPAQQNLYRDVMLENYRNLVSLGFVISNPDLVTCLEQIKEPCNLKIHETAAKPPAICSPFSQDLSPVQGIEDSF

SEQ ID NO: 72 - protein, 112 aa, synthetic construct
MSTLLQGGHNLLSSASFQESVTFKDVIVDFTQEEWKQLDPGQRDLFRDVTLENYTHLVSIGLQVSKPDVISQLEQGTEPWIMEPSIPVGTCADWETRLENSVSAPEPDISEE

SEQ ID NO: 73 - protein, 112 aa, synthetic construct
MDPAQVPVAADLLTDHEEGYVTFEDVAVYFSQEEWRLLDDAQRLLYRNVMLENFTLLASLGLASSKTHEITQLESWEEPFMPAWEVVTSAIPRGCWHGAEAEEAPEQIASVG

SEQ ID NO: 74 - protein, 112 aa, synthetic construct
MKKLEAVGTGIEPKAMSQGLVTFGDVAVDFSQEEWEWLNPIQRNLYRKVMLENYRNLASLGLCVSKPDVISSLEQGKEPWTVKRKMTRAWCPDLKAVWKIKELPLKKDFCEG

SEQ ID NO: 75 - protein, 108 aa, synthetic construct
MSLLGEHWDYDALFETQPGLVTIKNLAVDFRQQLHPAQKNFCKNGIWENNSDLGSAGHCVAKPDLVSLLEQEKEPWMVKRELTGSLFSGQRSVHETQELFPKQDSYAE

SEQ ID NO: 76 - protein, 113 aa, synthetic construct
MLALAASQPARLEERLIRDRDLGASLLPAAPQEQWRQLDSTQKEQYWDLILETYGKMVSGAGISHPKSDLTNSIEFGEELAGIYLHVNEKIPRPTCIGDRQENDKENLNLENH

SEQ ID NO: 77 - protein, 131 aa, synthetic construct
MEGRPGETTDTCFVSGVHGPVALGDIPFYFSREEWGTLDPAQRDLFWDIKRENSRNTTLGFGLKGQSEKSLLQEMVPVVPGQTGSDVTVSWSPEEAEAWESENRPRAALGPVVGARRGRPPTRRRQFRDLA

SEQ ID NO: 78 - protein, 116 aa, synthetic construct
MVAVVRALQRALDGTSSQGMVTFEDTAVSLTWEEWERLDPARRDFCRESAQKDSGSTVPPSLESRVENKELIPMQQILEEAEPQGQLQEAFQGKRPLFSKCGSTHEDRVEKQSGDP

SEQ ID NO: 79 - protein, 113 aa, synthetic construct
MNKSQGSVSFTDVTVDFTQEEWEQLDPSQRILYMDVMLENYSNLLSVEVWKADDQMERDHRNPDEQARQFLILKNQTPIEERGDLFGKALNLNTDFVSLRQVPYKYDLYEKTL

SEQ ID NO: 80 - protein, 108 aa, synthetic construct
MAHGSVTFRDVAIDFSQEEWEFLDPAQRDLYRDVMWENYSNFISLGPSISKPDVITLLDEERKEPGMVVREGTRRYCPDLESRYRTNTLSPEKDIYEIYSFQWDIMER

SEQ ID NO: 81 - protein, 141 aa, synthetic construct
MAAAVLRDSTSVPVTAEAKLMGFTQGCVTFEDVAIYFSQEEWGLLDEAQRLLYRDVMLENFALITALVCWHGMEDEETPEQSVSVEGVPQVRTPEASPSTQKIQSCDMCVPFLTDILHLTDLPGQELYLTGACAVFHQDQK

SEQ ID NO: 82 - protein, 133 aa, synthetic construct
MLPPTAASQREGHTEGGELVNELLKSWLKGLVTFEDVAVEFTQEEWALLDPAQRTLYRDVMLENCRNLASLGNQVDKPRLISQLEQEDKVMTEERGILSGTCPDVENPFKAKGLTPKLHVFRKEQSRNMKMER

SEQ ID NO: 83 - protein, 107 aa, synthetic construct
MAQESVMFSDVSVDFSQEEWECLNDDQRDLYRDVMLENYSNLVSMGHSISKPNVISYLEQGKEPWLADRELTRGQWPVLESRCETKKLFLKKEIYEIESTQWEIMEK

SEQ ID NO: 84 - protein, 114 aa, synthetic construct
MPGAPGSLEMGPLTFRDVTIEFSLEEWQCLDTVQQNLYRDVMLENYRNLVFLGMAVFKPDLITCLKQGKEPWNMKRHEMVTKPPVMRSHFTQDLWPDQSTKDSFQEVILRTYAR

SEQ ID NO: 85 - protein, 95 aa, synthetic construct
MAGSQFPDFKHLGTFLVFEELVTFEDVLVDFSPEELSSLSAAQRNLYREVMLENYRNLVSLGHQFSKPDIISRLEEEESYAMETDSRHTVICQGE

SEQ ID NO: 86 - protein, 78 aa, synthetic construct
MPGPPRSLEMGLLTFRDVAIEFSLEEWQHLDIAQQNLYRNVMLENYRNLAFLGIAVSKPDLITCLEQGKEPWNMKRHE

SEQ ID NO: 87 - protein, 93 aa, synthetic construct
MAPPLAPLPPRDPNGAGPEWREPGAVSFADVAVYFCREEWGCLRPAQRALYRDVMRETYGHLSALGIGGNKPALISWVEEEAELWGPAAQDPE

SEQ ID NO: 88 - protein, 100 aa, synthetic construct
MGPPLAPRPAHVPGEAGPRRTRESRPGAVSFADVAVYFSPEEWECLRPAQRALYRDVMRETFGHLGALGFSVPKPAFISWVEGEVEAWSPEAQDPDGESS

SEQ ID NO: 89 - protein, 573 aa, synthetic construct
MDAKSLTAWSRTLVTFKDVFVDFTREEWKLLDTAQQIVYRNVMLENYKNLVSLGYQLTKPDVILRLEKGEEPWLVEREIHQETHPDSETAFEIKSSVSSRSIFKDKQSCDIKMEGMARNDLWYLSLEEVWKCRDQLDKYQENPERHLRQVAFTQKKVLTQERVSESGKYGGNCLLPAQLVLREYFHKRDSHTKSLKHDLVLNGHQDSCASNSNECGQTFCQNIHLIQFARTHTGDKSYKCPDNDNSLTHGSSLGISKGIHREKPYECKECGKFFSWRSNLTRHQLIHTGEKPYECKECGKSFSRSSHLIGHQKTHTGEEPYECKECGKSFSWFSHLVTHQRTHTGDKLYTCNQCGKSFVHSSRLIRHQRTHTGEKPYECPECGKSFRQSTHLILHQRTHVRVRPYECNECGKSYSQRSHLVVHHRIHTGLKPFECKDCGKCFSRSSHLYSHQRTHTGEKPYECHDCGKSFSQSSALIVHQRIHTGEKPYECCQCGKAFIRKNDLIKHQRIHVGEETYKCNQCGIIFSQNSPFIVHQIAHTGEQFLTCNQCGTALVNTSNLIGYQTNHIRENAY

SEQ ID NO: 90 - protein, 191 aa, synthetic construct
MGKKTKRTADSSSSEDEEEYVVEKVLDRRVVKGQVEYLLKWKGFSEEHNTWEPEKNLDCPELISEFMKKYKKMKEGENNKPREKSESNKRKSNFSNSADDIKSKKKREQSNDIARGFERGLEPEKIIGATDSCGDLMFLMKWKDTDEADLVLAKEANVKCPQIVIAFYEERLTWHAYPEDAENKEKETAKS

SEQ ID NO: 91 - protein, 228 aa, synthetic construct
MTMGDKKSPTRPKRQAKPAADEGFWDCSVCTFRNSAEAFKCSICDVRKGTSTRKPRINSQLVAQQVAQQYATPPPPKKEKKEKVEKQDKEKPEKDKEISPSVTKKNTNKKTKPKSDILKDPPSEANSIQSANATTKTSETNHTSRPRLKNVDRSTAQQLAVTVGNVTVIITDFKEKTRSSSTSSSTVTSSAGSEQQNQSSSGSESTDKGSSRSSTPKGDMSAVNDESF

SEQ ID NO: 92 - protein, 180 aa, synthetic construct
MGDKKSPTRPKRQPKPSSDEGYWDCSVCTFRNSAEAFKCMMCDVRKGTSTRKPRPVSQLVAQQVTQQFVPPTQSKKEKKDKVEKEKSEKETTSKKNSHKKTRPRLKNVDRSSAQHLEVTVGDLTVIITDFKEKTKSPPASSAASADQHSQSGSSSDNTERGMSRSSSPRGEASSLNGESH

SEQ ID NO: 93 - protein, 3065 aa, synthetic construct
MEEKQQIILANQDGGTVAGAAPTFFVILKQPGNGKTDQGILVTNQDACALASSVSSPVKSKGKICLPADCTVGGITVTLDNNSMWNEFYHRSTEMILTKQGRRMFPYCRYWITGLDSNLKYILVMDISPVDNHRYKWNGRWWEPSGKAEPHVLGRVFIHPESPSTGHYWMHQPVSFYKLKLTNNTLDQEGHIILHSMHRYLPRLHLVPAEKAVEVIQLNGPGVHTFTFPQTEFFAVTAYQNIQITQLKIDYNPFAKGFRDDGLNNKPQRDGKQKNSSDQEGNNISSSSGHRVRLTEGQGSEIQPGDLDPLSRGHETSGKGLEKTSLNIKRDFLGFMDTDSALSEVPQLKQEISECLIASSFEDDSRVASPLDQNGSFNVVIKEEPLDDYDYELGECPEGVTVKQEETDEETDVYSNSDDDPILEKQLKRHNKVDNPEADHLSSKWLPSSPSGVAKAKMFKLDTGKMPVVYLEPCAVTRSTVKISELPDNMLSTSRKDKSSMLAELEYLPTYIENSNETAFCLGKESENGLRKHSPDLRVVQKYPLLKEPQWKYPDISDSISTERILDDSKDSVGDSLSGKEDLGRKRTTMLKIATAAKVVNANQNASPNVPGKRGRPRKLKLCKAGRPPKNTGKSLISTKNTPVSPGSTFPDVKPDLEDVDGVLFVSFESKEALDIHAVDGTTEESSSLQASTTNDSGYRARISQLEKELIEDLKTLRHKQVIHPGLQEVGLKLNSVDPTMSIDLKYLGVQLPLAPATSFPFWNLTGTNPASPDAGFPFVSRTGKTNDFTKIKGWRGKFHSASASRNEGGNSESSLKNRSAFCSDKLDEYLENEGKLMETSMGFSSNAPTSPVVYQLPTKSTSYVRTLDSVLKKQSTISPSTSYSLKPHSVPPVSRKAKSQNRQATFSGRTKSSYKSILPYPVSPKQKYSHVILGDKVTKNSSGIISENQANNFVVPTLDENIFPKQISLRQAQQQQQQQQGSRPPGLSKSQVKLMDLEDCALWEGKPRTYITEERADVSLTTLLTAQASLKTKPIHTIIRKRAPPCNNDFCRLGCVCSSLALEKRQPAHCRRPDCMFGCTCLKRKVVLVKGGSKTKHFQRKAAHRDPVFYDTLGEEAREEEEGIREEEEQLKEKKKRKKLEYTICETEPEQPVRHYPLWVKVEGEVDPEPVYIPTPSVIEPMKPLLLPQPEVLSPTVKGKLLTGIKSPRSYTPKPNPVIREEDKDPVYLYFESMMTCARVRVYERKKEDQRQPSSSSSPSPSFQQQTSCHSSPENHNNAKEPDSEQQPLKQLTCDLEDDSDKLQEKSWKSSCNEGESSSTSYMHQRSPGGPTKLIEIISDCNWEEDRNKILSILSQHINSNMPQSLKVGSFIIELASQRKSRGEKNPPVYSSRVKISMPSCQDQDDMAEKSGSETPDGPLSPGKMEDISPVQTDALDSVRERLHGGKGLPFYAGLSPAGKLVAYKRKPSSSTSGLIQVASNAKVAASRKPRTLLPSTSNSKMASSSGTATNRPGKNLKAFVPAKRPIAARPSPGGVFTQFVMSKVGALQQKIPGVSTPQTLAGTQKFSIRPSPVMVVTPVVSSEPVQVCSPVTAAVTTTTPQVFLENTTAVTPMTAISDVETKETTYSSGATTTGVVEVSETNTSTSVTSTQSTATVNLTKTTGITTPVASVAFPKSLVASPSTITLPVASTASTSLVVVTAAASSSMVTTPTSSLGSVPIILSGINGSPPVSQRPENAAQIPVATPQVSPNTVKRAGPRLLLIPVQQGSPTLRPVSNTQLQGHRMVLQPVRSPSGMNLFRHPNGQIVQLLPLHQLRGSNTQPNLQPVMFRNPGSVMGIRLPAPSKPSETPPSSTSSSAFSVMNPVIQAVGSSSAVNVITQAPSLLSSGASFVSQAGTLTLRISPPEPQSFASKTGSETKITYSSGGQPVGTASLIPLQSGSFALLQLPGQKPVPSSILQHVASLQMKRESQNPDQKDETNSIKREQETKKVLQSEGEAVDPEANVIKQNSGAATSEETLNDSLEDRGDHLDEECLPEEGCATVKPSEHSCITGSHTDQDYKDVNEEYGARNRKSSKEKVAVLEVRTISEKASNKTVQNLSKVQHQKLGDVKVEQQKGFDNPEENSSEFPVTFKEESKFELSGSKVMEQQSNLQPEAKEKECGDSLEKDRERWRKHLKGPLTRKCVGASQECKKEADEQLIKETKTCQENSDVFQQEQGISDLLGKSGITEDARVLKTECDSWSRISNPSAFSIVPRRAAKSSRGNGHFQGHLLLPGEQIQPKQEKKGGRSSADFTVLDLEEDDEDDNEKTDDSIDEIVDVVSDYQSEEVDDVEKNNCVEYIEDDEEHVDIETVEELSEEINVAHLKTTAAHTQSFKQPSCTHISADEKAAERSRKAPPIPLKLKPDYWSDKLQKEAEAFAYYRRTHTANERRRRGEMRDLFEKLKITLGLLHSSKVSKSLILTRAFSEIQGLTDQADKLIGQKNLLTRKRNILIRKVSSLSGKTEEVVLKKLEYIYAKQQALEAQKRKKKMGSDEFDISPRISKQQEGSSASSVDLGQMFINNRRGKPLILSRKKDQATENTSPLNTPHTSANLVMTPQGQLLTLKGPLFSGPVVAVSPDLLESDLKPQVAGSAVALPENDDLFMMPRIVNVTSLATEGGLVDMGGSKYPHEVPDSKPSDHLKDTVRNEDNSLEDKGRISSRGNRDGRVTLGPTQVFLANKDSGYPQIVDVSNMQKAQEFLPKKISGDMRGIQYKWKESESRGERVKSKDSSFHKLKMKDLKDSSIEMELRKVTSAIEEAALDSSELLTNMEDEDDTDETLTSLLNEIAFLNQQLNDDSVGLAELPSSMDTEFPGDARRAFISKVPPGSRATFQVEHLGTGLKELPDVQGESDSISPLLLHLEDDDFSENEKQLAEPASEPDVLKIVIDSEIKDSLLSNKKAIDGGKNTSGLPAEPESVSSPPTLHMKTGLENSNSTDTLWRPMPKLAPLGLKVANPSSDADGQSLKVMPCLAPIAAKVGSVGHKMNLTGNDQEGRESKVMPTLAPVVAKLGNSGASPSSAGK

SEQ ID NO: 94 - protein, 185 aa, synthetic construct
MGKKQNKKKVEEVLEEEEEEYVVEKVLDRRVVKGKVEYLLKWKGFSDEDNTWEPEENLDCPDLIAEFLQSQKTAHETDKSEGGKRKADSDSEDKGEESKPKKKKEESEKPRGFARGLEPERIIGATDSSGELMFLMKWKNSDEADLVPAKEANVKCPQVVISFYEERLTWHSYPSEDDDKKDDKN

SEQ ID NO: 95 - protein, 660 aa, synthetic construct
MLVCYSVLACEILWDLPCSIMGSPLGHFTWDKYLKETCSVPAPVHCFKQSYTPPSNEFKISMKLEAQDPRNTTSTCIATVVGLTGARLRLRLDGSDNKNDFWRLVDSAEIQPIGNCEKNGGMLQPPLGFRLNASSWPMFLLKTLNGAEMAPIRIFHKEPPSPSHNFFKMGMKLEAVDRKNPHFICPATIGEVRGSEVLVTFDGWRGAFDYWCRFDSRDIFPVGWCSLTGDNLQPPGTKVVIPKNPYPASDVNTEKPSIHSSTKTVLEHQPGQRGRKPGKKRGRTPKTLISHPISAPSKTAEPLKFPKKRGPKPGSKRKPRTLLNPPPASPTTSTPEPDTSTVPQDAATIPSSAMQAPTVCIYLNKNGSTGPHLDKKKVQQLPDHFGPARASVVLQQAVQACIDCAYHQKTVFSFLKQGHGGEVISAVFDREQHTLNLPAVNSITYVLRFLEKLCHNLRSDNLFGNQPFTQTHLSLTAIEYSHSHDRYLPGETFVLGNSLARSLEPHSDSMDSASNPTNLVSTSQRHRPLLSSCGLPPSTASAVRRLCSRGVLKGSNERRDMESFWKLNRSPGSDRYLESRDASRLSGRDPSSWTVEDVMQFVREADPQLGPHADLFRKHEIDGKALLLLRSDMMMKYMGLKLGPALKLSYHIDRLKQGKF

SEQ ID NO: 96 - protein, 860 aa, synthetic construct
MEQVAEGARVTAVPVSAADSTEELAEVEEGVGVVGEDNDAAARGAEAFGDSEEDGEDVFEVEKILDMKTEGGKVLYKVRWKGYTSDDDTWEPEIHLEDCKEVLLEFRKKIAENKAKAVRKDIQRLSLNNDIFEANSDSDQQSETKEDTSPKKKKKKLRQREEKSPDDLKKKKAKAGKLKDKSKPDLESSLESLVFDLRTKKRISEAKEELKESKKPKKDEVKETKELKKVKKGEIRDLKTKTREDPKENRKTKKEKFVESQVESESSVLNDSPFPEDDSEGLHSDSREEKQNTKSARERAGQDMGLEHGFEKPLDSAMSAEEDTDVRGRRKKKTPRKAEDTRENRKLENKNAFLEKKTVPKKQRNQDRSKSAAELEKLMPVSAQTPKGRRLSGEERGLWSTDSAEEDKETKRNESKEKYQKRHDSDKEEKGRKEPKGLKTLKEIRNAFDLFKLTPEEKNDVSENNRKREEIPLDFKTIDDHKTKENKQSLKERRNTRDETDTWAYIAAEGDQEVLDSVCQADENSDGRQQILSLGMDLQLEWMKLEDFQKHLDGKDENFAATDAIPSNVLRDAVKNGDYITVKVALNSNEEYNLDQEDSSGMTLVMLAAAGGQDDLLRLLITKGAKVNGRQKNGTTALIHAAEKNFLTTVAILLEAGAFVNVQQSNGETALMKACKRGNSDIVRLVIECGADCNILSKHQNSALHFAKQSNNVLVYDLLKNHLETLSRVAEETIKDYFEARLALLEPVFPIACHRLCEGPDFSTDFNYKPPQNIPEGSGILLFIFHANFLGKEVIARLCGPCSVQAVVLNDKFQLPVFLDSHFVYSFSPVAGPNKLFIRLTEAPSAKVKLLIGAYRVQLQ

SEQ ID NO: 97 - protein, 103 aa, synthetic construct
MSEEKPKEGVKTENDHINLKVAGQDGSVVQFKIKRHTPLSKLMKAYCERQGLSMRQIRFRFDGQPINETDTPAQLEMEDEDTIDVFQQQTGGVPESSLAGHSF

SEQ ID NO: 98 - protein, 4834 aa, synthetic construct
MPSESFCLAAQARLDSKWLKTDIQLAFTRDGLCGLWNEMVKDGEIVYTGTESTQNGELPPRKDDSVEPSGTKKEDLNDKEKKDEEETPAPIYRAKSILDSWVWGKQPDVNELKECLSVLVKEQQALAVQSATTTLSALRLKQRLVILERYFIALNRTVFQENVKVKWKSSGISLPPVDKKSSRPAGKGVEGLARVGSRAALSFAFAFLRRAWRSGEDADLCSELLQESLDALRALPEASLFDESTVSSVWLEVVERATRFLRSVVTGDVHGTPATKGPGSIPLQDQHLALAILLELAVQRGTLSQMLSAILLLLQLWDSGAQETDNERSAQGTSAPLLPLLQRFQSIICRKDAPHSEGDMHLLSGPLSPNESFLRYLTLPQDNELAIDLRQTAVVVMAHLDRLATPCMPPLCSSPTSHKGSLQEVIGWGLIGWKYYANVIGPIQCEGLANLGVTQIACAEKRFLILSRNGRVYTQAYNSDTLAPQLVQGLASRNIVKIAAHSDGHHYLALAATGEVYSWGCGDGGRLGHGDTVPLEEPKVISAFSGKQAGKHVVHIACGSTYSAAITAEGELYTWGRGNYGRLGHGSSEDEAIPMLVAGLKGLKVIDVACGSGDAQTLAVTENGQVWSWGDGDYGKLGRGGSDGCKTPKLIEKLQDLDVVKVRCGSQFSIALTKDGQVYSWGKGDNQRLGHGTEEHVRYPKLLEGLQGKKVIDVAAGSTHCLALTEDSEVHSWGSNDQCQHFDTLRVTKPEPAALPGLDTKHIVGIACGPAQSFAWSSCSEWSIGLRVPFVVDICSMTFEQLDLLLRQVSEGMDGSADWPPPQEKECVAVATLNLLRLQLHAAISHQVDPEFLGLGLGSILLNSLKQTVVTLASSAGVLSTVQSAAQAVLQSGWSVLLPTAEERARALSALLPCAVSGNEVNISPGRRFMIDLLVGSLMADGGLESALHAAITAEIQDIEAKKEAQKEKEIDEQEANASTFHRSRTPLDKDLINTGICESSGKQCLPLVQLIQQLLRNIASQTVARLKDVARRISSCLDFEQHSRERSASLDLLLRFQRLLISKLYPGESIGQTSDISSPELMGVGSLLKKYTALLCTHIGDILPVAASIASTSWRHFAEVAYIVEGDFTGVLLPELVVSIVLLLSKNAGLMQEAGAVPLLGGLLEHLDRFNHLAPGKERDDHEELAWPGIMESFFTGQNCRNNEEVTLIRKADLENHNKDGGFWTVIDGKVYDIKDFQTQSLTGNSILAQFAGEDPVVALEAALQFEDTRESMHAFCVGQYLEPDQEIVTIPDLGSLSSPLIDTERNLGLLLGLHASYLAMSTPLSPVEIECAKWLQSSIFSGGLQTSQIHYSYNEEKDEDHCSSPGGTPASKSRLCSHRRALGDHSQAFLQAIADNNIQDHNVKDFLCQIERYCRQCHLTTPIMFPPEHPVEEVGRLLLCCLLKHEDLGHVALSLVHAGALGIEQVKHRTLPKSVVDVCRVVYQAKCSLIKTHQEQGRSYKEVCAPVIERLRFLFNELRPAVCNDLSIMSKFKLLSSLPRWRRIAQKIIRERRKKRVPKKPESTDDEEKIGNEESDLEEACILPHSPINVDKRPIAIKSPKDKWQPLLSTVTGVHKYKWLKQNVQGLYPQSPLLSTIAEFALKEEPVDVEKMRKCLLKQLERAEVRLEGIDTILKLASKNFLLPSVQYAMFCGWQRLIPEGIDIGEPLTDCLKDVDLIPPFNRMLLEVTFGKLYAWAVQNIRNVLMDASAKFKELGIQPVPLQTITNENPSGPSLGTIPQARFLLVMLSMLTLQHGANNLDLLLNSGMLALTQTALRLIGPSCDNVEEDMNASAQGASATVLEETRKETAPVQLPVSGPELAAMMKIGTRVMRGVDWKWGDQDGPPPGLGRVIGELGEDGWIRVQWDTGSTNSYRMGKEGKYDLKLAELPAAAQPSAEDSDTEDDSEAEQTERNIHPTAMMFTSTINLLQTLCLSAGVHAEIMQSEATKTLCGLLRMLVESGTTDKTSSPNRLVYREQHRSWCTLGFVRSIALTPQVCGALSSPQWITLLMKVVEGHAPFTATSLQRQILAVHLLQAVLPSWDKTERARDMKCLVEKLFDFLGSLLTTCSSDVPLLRESTLRRRRVRPQASLTATHSSTLAEEVVALLRTLHSLTQWNGLINKYINSQLRSITHSFVGRPSEGAQLEDYFPDSENPEVGGLMAVLAVIGGIDGRLRLGGQVMHDEFGEGTVTRITPKGKITVQFSDMRTCRVCPLNQLKPLPAVAFNVNNLPFTEPMLSVWAQLVNLAGSKLEKHKIKKSTKQAFAGQVDLDLLRCQQLKLYILKAGRALLSHQDKLRQILSQPAVQETGTVHTDDGAVVSPDLGDMSPEGPQPPMILLQQLLASATQPSPVKAIFDKQELEAAALAVCQCLAVESTHPSSPGFEDCSSSEATTPVAVQHIRPARVKRRKQSPVPALPIVVQLMEMGFSRRNIEFALKSLTGASGNASSLPGVEALVGWLLDHSDIQVTELSDADTVSDEYSDEEVVEDVDDAAYSMSTGAVVTESQTYKKRADFLSNDDYAVYVRENIQVGMMVRCCRAYEEVCEGDVGKVIKLDRDGLHDLNVQCDWQQKGGTYWVRYIHVELIGYPPPSSSSHIKIGDKVRVKASVTTPKYKWGSVTHQSVGVVKAFSANGKDIIVDFPQQSHWTGLLSEMELVPSIHPGVTCDGCQMFPINGSRFKCRNCDDFDFCETCFKTKKHNTRHTFGRINEPGQSAVFCGRSGKQLKRCHSSQPGMLLDSWSRMVKSLNVSSSVNQASRLIDGSEPCWQSSGSQGKHWIRLEIFPDVLVHRLKMIVDPADSSYMPSLVVVSGGNSLNNLIELKTININPSDTTVPLLNDCTEYHRYIEIAIKQCRSSGIDCKIHGLILLGRIRAEEEDLAAVPFLASDNEEEEDEKGNSGSLIRKKAAGLESAATIRTKVFVWGLNDKDQLGGLKGSKIKVPSFSETLSALNVVQVAGGSKSLFAVTVEGKVYACGEATNGRLGLGISSGTVPIPRQITALSSYVVKKVAVHSGGRHATALTVDGKVFSWGEGDDGKLGHFSRMNCDKPRLIEALKTKRIRDIACGSSHSAALTSSGELYTWGLGEYGRLGHGDNTTQLKPKMVKVLLGHRVIQVACGSRDAQTLALTDEGLVFSWGDGDFGKLGRGGSEGCNIPQNIERLNGQGVCQIECGAQFSLALTKSGVVWTWGKGDYFRLGHGSDVHVRKPQVVEGLRGKKIVHVAVGALHCLAVTDSGQVYAWGDNDHGQQGNGTTTVNRKPTLVQGLEGQKITRVACGSSHSVAWTTVDVATPSVHEPVLFQTARDPLGASYLGVPSDADSSAASNKISGASNSKPNRPSLAKILLSLDGNLAKQQALSHILTALQIMYARDAVVGALMPAAMIAPVECPSFSSAAPSDASAMASPMNGEECMLAVDIEDRLSPNPWQEKREIVSSEDAVTPSAVTPSAPSASARPFIPVTDDLGAASIIAETMTKTKEDVESQNKAAGPEPQALDEFTSLLIADDTRVVVDLLKLSVCSRAGDRGRDVLSAVLSGMGTAYPQVADMLLELCVTELEDVATDSQSGRLSSQPVVVESSHPYTDDTSTSGTVKIPGAEGLRVEFDRQCSTERRHDPLTVMDGVNRIVSVRSGREWSDWSSELRIPGDELKWKFISDGSVNGWGWRFTVYPIMPAAGPKELLSDRCVLSCPSMDLVTCLLDFRLNLASNRSIVPRLAASLAACAQLSALAASHRMWALQRLRKLLTTEFGQSININRLLGENDGETRALSFTGSALAALVKGLPEALQRQFEYEDPIVRGGKQLLHSPFFKVLVALACDLELDTLPCCAETHKWAWFRRYCMASRVAVALDKRTPLPRLFLDEVAKKIRELMADSENMDVLHESHDIFKREQDEQLVQWMNRRPDDWTLSAGGSGTIYGWGHNHRGQLGGIEGAKVKVPTPCEALATLRPVQLIGGEQTLFAVTADGKLYATGYGAGGRLGIGGTESVSTPTLLESIQHVFIKKVAVNSGGKHCLALSSEGEVYSWGEAEDGKLGHGNRSPCDRPRVIESLRGIEVVDVAAGGAHSACVTAAGDLYTWGKGRYGRLGHSDSEDQLKPKLVEALQGHRVVDIACGSGDAQTLCLTDDDTVWSWGDGDYGKLGRGGSDGCKVPMKIDSLTGLGVVKVECGSQFSVALTKSGAVYTWGKGDYHRLGHGSDDHVRRPRQVQGLQGKKVIAIATGSLHCVCCTEDGEVYTWGDNDEGQLGDGTTNAIQRPRLVAALQGKKVNRVACGSAHTLAWSTSKPASAGKLPAQVPMEYNHLQEIPIIALRNRLLLLHHLSELFCPCIPMFDLEGSLDETGLGPSVGFDTLRGILISQGKEAAFRKVVQATMVRDRQHGPVVELNRIQVKRSRSKGGLAGPDGTKSVFGQMCAKMSSFGPDSLLLPHRVWKVKFVGESVDDCGGGYSESIAEICEELQNGLTPLLIVTPNGRDESGANRDCYLLSPAARAPVHSSMFRFLGVLLGIAIRTGSPLSLNLAEPVWKQLAGMSLTIADLSEVDKDFIPGLMYIRDNEATSEEFEAMSLPFTVPSASGQDIQLSSKHTHITLDNRAEYVRLAINYRLHEFDEQVAAVREGMARVVPVPLLSLFTGYELETMVCGSPDIPLHLLKSVATYKGIEPSASLIQWFWEVMESFSNTERSLFLRFVWGRTRLPRTIADFRGRDFVIQVLDKYNPPDHFLPESYTCFFLLKLPRYSCKQVLEEKLKYAIHFCKSIDTDDYARIALTGEPAADDSSDDSDNEDVDSFASDSTQDYLTGH

SEQ ID NO: 99 - protein, 593 aa, synthetic construct
MAEMGSKGVTAGKIASNVQKKLTRAQEKVLQKLGKADETKDEQFEQCVQNFNKQLTEGTRLQKDLRTYLASVKAMHEASKKLNECLQEVYEPDWPGRDEANKIAENNDLLWMDYHQKLVDQALLTMDTYLGQFPDIKSRIAKRGRKLVDYDSARHHYESLQTAKKKDEAKIAKPVSLLEKAAPQWCQGKLQAHLVAQTNLLRNQAEEELIKAQKVFEEMNVDLQEELPSLWNSRVGFYVNTFQSIAGLEENFHKEMSKLNQNLNDVLVGLEKQHGSNTFTVKAQPSDNAPAKGNKSPSPPDGSPAATPEIRVNHEPEPAGGATPGATLPKSPSQLRKGPPVPPPPKHTPSKEVKQEQILSLFEDTFVPEISVTTPSQFEAPGPFSEQASLLDLDFDPLPPVTSPVKAPTPSGQSIPWDLWEPTESPAGSLPSGEPSAAEGTFAVSWPSQTAEPGPAQPAEASEVAGGTQPAAGAQEPGETAASEAASSSLPAVVVETFPATVNGTVEGGSGAGRLDLPPGFMFKVQAQHDYTATDTDELQLKAGDVVLVIPFQNPEEQDEGWLMGVKESDWNQHKELEKCRGVFPENFTERVP

SEQ ID NO: 100 - protein, 344 aa, synthetic construct
MHRTTRIKITELNPHLMCALCGGYFIDATTIVECLHSFCKTCIVRYLETNKYCPMCDVQVHKTRPLLSIRSDKTLQDIVYKLVPGLFKDEMKRRRDFYAAYPLTEVPNGSNEDRGEVLEQEKGALSDDEIVSLSIEFYEGARDRDEKKGPLENGDGDKEKTGVRFLRCPAAMTVMHLAKFLRNKMDVPSKYKVEVLYEDEPLKEYYTLMDIAYIYPWRRNGPLPLKYRVQPACKRLTLATVPTPSEGTNTSGASECESVSDKAPSPATLPATSSSLPSPATPSHGSPSSHGPPATHPTSPTPPSTASGATTAANGGSLNCLQTPSSTSRGRKMTVNGAPVPPLT

SEQ ID NO: 101 - protein, 526 aa, synthetic construct
MDVRFYPPPAQPAAAPDAPCLGPSPCLDPYYCNKFDGENMYMSMTEPSQDYVPASQSYPGPSLESEDFNIPPITPPSLPDHSLVHLNEVESGYHSLCHPMNHNGLLPFHPQNMDLPEITVSNMLGQDGTLLSNSISVMPDIRNPEGTQYSSHPQMAAMRPRGQPADIRQQPGMMPHGQLTTINQSQLSAQLGLNMGGSNVPHNSPSPPGSKSATPSPSSSVHEDEGDDTSKINGGEKRPASDMGKKPKTPKKKKKKDPNEPQKPVSAYALFFRDTQAAIKGQNPNATFGEVSKIVASMWDGLGEEQKQVYKKKTEAAKKEYLKQLAAYRASLVSKSYSEPVDVKTSQPPQLINSKPSVFHGPSQAHSALYLSSHYHQQPGMNPHLTAMHPSLPRNIAPKPNNQMPVTVSIANMAVSPPPPLQISPPLHQHLNMQQHQPLTMQQPLGNQLPMQVQSALHSPTMQQGFTLQPDYQTIINPTSTAAQVVTQAMEYVRSGCRNPPPQPVDWNNDYCSSGGMQRDKALYLT

SEQ ID NO: 102 - protein, 472 aa, synthetic construct
MLGTVKMEGHETSDWNSYYADTQEAYSSVPVSNMNSGLGSMNSMNTYMTMNTMTTSGNMTPASFNMSYANPGLGAGLSPGAVAGMPGGSAGAMNSMTAAGVTAMGTALSPSGMGAMGAQQAASMNGLGPYAAAMNPCMSPMAYAPSNLGRSRAGGGGDAKTFKRSYPHAKPPYSYISLITMAIQQAPSKMLTLSEIYQWIMDLFPYYRQNQQRWQNSIRHSLSFNDCFVKVARSPDKPGKGSYWTLHPDSGNMFENGCYLRRQKRFKCEKQPGAGGGGGSGSGGSGAKGGPESRKDPSGASNPSADSPLHRGVHGKTGQLEGAPAPGPAASPQTLDHSGATATGGASELKTPASSTAPPISSGPGALASVPASHPAHGLAPHESQLHLKGDPHYSFNHPFSINNLMSSSEQQHKLDFKAYEQALQYSPYGSTLPASLPLGSASVTTRSPIEPSALEPAYYQGVYSRPVLNTS

SEQ ID NO: 103 - protein, 457 aa, synthetic construct
MLGAVKMEGHEPSDWSSYYAEPEGYSSVSNMNAGLGMNGMNTYMSMSAAAMGSGSGNMSAGSMNMSSYVGAGMSPSLAGMSPGAGAMAGMGGSAGAAGVAGMGPHLSPSLSPLGGQAAGAMGGLAPYANMNSMSPMYGQAGLSRARDPKTYRRSYTHAKPPYSYISLITMAIQQSPNKMLTLSEIYQWIMDLFPFYRQNQQRWQNSIRHSLSFNDCFLKVPRSPDKPGKGSFWTLHPDSGNMFENGCYLRRQKRFKCEKQLALKEAAGAAGSGKKAAAGAQASQAQLGEAAGPASETPAGTESPHSSASPCQEHKRGGLGELKGTPAAALSPPEPAPSPGQQQQAAAHLLGPPHHPGLPPEAHLKPEHHYAFNHPFSINNLMSSEQQHHHSHHHHQPHKMDLKAYEQVMHYPGYGSPMPGSLAMGPVTNKTGLDASPLAADTSYYQGVYSRPIMNSS

SEQ ID NO: 104 - protein, 584 aa, synthetic construct
MASVQASRRQWCYLCDLPKMPWAMVWDFSEAVCRGCVNFEGADRIELLIDAARQLKRSHVLPEGRSPGPPALKHPATKDLAAAAAQGPQLPPPQAQPQPSGTGGGVSGQDRYDRATSSGRLPLPSPALEYTLGSRLANGLGREEAVAEGARRALLGSMPGLMPPGLLAAAVSGLGSRGLTLAPGLSPARPLFGSDFEKEKQQRNADCLAELNEAMRGRAEEWHGRPKAVREQLLALSACAPFNVRFKKDHGLVGRVFAFDATARPPGYEFELKLFTEYPCGSGNVYAGVLAVARQMFHDALREPGKALASSGFKYLEYERRHGSGEWRQLGELLTDGVRSFREPAPAEALPQQYPEPAPAALCGPPPRAPSRNLAPTPRRRKASPEPEGEAAGKMTTEEQQQRHWVAPGGPYSAETPGVPSPIAALKNVAEALGHSPKDPGGGGGPVRAGGASPAASSTAQPPTQHRLVARNGEAEVSPTAGAEAVSGGGSGTGATPGAPLCCTLCRERLEDTHFVQCPSVPGHKFCFPCSREFIKAQGPAGEVYCPSGDKCPLVGSSVPWAFMQGEIATILAGDIKVKKERDP

SEQ ID NO: 105 - protein, 587 aa, synthetic construct
MAAAVAVAAASRRQSCYLCDLPRMPWAMIWDFTEPVCRGCVNYEGADRVEFVIETARQLKRAHGCFPEGRSPPGAAASAAAKPPPLSAKDILLQQQQQLGHGGPEAAPRAPQALERYPLAAAAERPPRLGSDFGSSRPAASLAQPPTPQPPPVNGILVPNGFSKLEEPPELNRQSPNPRRGHAVPPTLVPLMNGSATPLPTALGLGGRAAASLAAVSGTAAASLGSAQPTDLGAHKRPASVSSSAAVEHEQREAAAKEKQPPPPAHRGPADSLSTAAGAAELSAEGAGKSRGSGEQDWVNRPKTVRDTLLALHQHGHSGPFESKFKKEPALTAGRLLGFEANGANGSKAVARTARKRKPSPEPEGEVGPPKINGEAQPWLSTSTEGLKIPMTPTSSFVSPPPPTASPHSNRTTPPEAAQNGQSPMAALILVADNAGGSHASKDANQVHSTTRRNSNSPPSPSSMNQRRLGPREVGGQGAGNTGGLEPVHPASLPDSSLATSAPLCCTLCHERLEDTHFVQCPSVPSHKFCFPCSRQSIKQQGASGEVYCPSGEKCPLVGSNVPWAFMQGEIATILAGDVKVKKERDS

SEQ ID NO: 106 - protein, 796 aa, synthetic construct
MSAAQVSSSRRQSCYLCDLPRMPWAMIWDFSEPVCRGCVNYEGADRIEFVIETARQLKRAHGCFQDGRSPGPPPPVGVKTVALSAKEAAAAAAAAAAAAAAAQQQQQQQQQQQQQQQQQQQQQQQQQLNHVDGSSKPAVLAAPSGLERYGLSAAAAAAAAAAAAVEQRSRFEYPPPPVSLGSSSHTARLPNGLGGPNGFPKPTPEEGPPELNRQSPNSSSAAASVASRRGTHGGLVTGLPNPGGGGGPQLTVPPNLLPQTLLNGPASAAVLPPPPPHALGSRGPPTPAPPGAPGGPACLGGTPGVSATSSSASSSTSSSVAEVGVGAGGKRPGSVSSTDQERELKEKQRNAEALAELSESLRNRAEEWASKPKMVRDTLLTLAGCTPYEVRFKKDHSLLGRVFAFDAVSKPGMDYELKLFIEYPTGSGNVYSSASGVAKQMYQDCMKDFGRGLSSGFKYLEYEKKHGSGDWRLLGDLLPEAVRFFKEGVPGADMLPQPYLDASCPMLPTALVSLSRAPSAPPGTGALPPAAPSGRGAAASLRKRKASPEPPDSAEGALKLGEEQQRQQWMANQSEALKLTMSAGGFAAPGHAAGGPPPPPPPLGPHSNRTTPPESAPQNGPSPMAALMSVADTLGTAHSPKDGSSVHSTTASARRNSSSPVSPASVPGQRRLASRNGDLNLQVAPPPPSAHPGMDQVHPQNIPDSPMANSGPLCCTICHERLEDTHFVQCPSVPSHKFCFPCSRESIKAQGATGEVYCPSGEKCPLVGSNVPWAFMQGEIATILAGDVKVKKERDP

SEQ ID NO: 107 - protein, 388 aa, synthetic construct
MTASVLLHPRWIEPTVMFLYDNGGGLVADELNKNMEGAAAAAAAAAAAAAAGAGGGGFPHPAAAAAGGNFSVAAAAAAAAAAAANQCRNLMAHPAPLAPGAASAYSSAPGEAPPSAAAAAAAAAAAAAAAAAASSSGGPGPAGPAGAEAAKQCSPCSAAAQSSSGPAALPYGYFGSGYYPCARMGPHPNAIKSCAQPASAAAAAAFADKYMDTAGPAAEEFSSRAKEFAFYHQGYAAGPYHHHQPMPGYLDMPVVPGLGGPGESRHEPLGLPMESYQPWALPNGWNGQMYCPKEQAQPPHLWKSTLPDVVSHPSDASSYRRGRKKRVPYTKVQLKELEREYATNKFITKDKRRRISATTNLSERQVTIWFQNRRVKEKKVINKLKTTS

SEQ ID NO: 108 - protein, 284 aa, synthetic construct
MEPGNYATLDGAKDIEGLLGAGGGRNLVAHSPLTSHPAAPTLMPAVNYAPLDLPGSAEPPKQCHPCPGVPQGTSPAPVPYGYFGGGYYSCRVSRSSLKPCAQAATLAAYPAETPTAGEEYPSRPTEFAFYPGYPGTYQPMASYLDVSVVQTLGAPGEPRHDSLLPVDSYQSWALAGGWNSQMCCQGEQNPPGPFWKAAFADSSGQHPPDACAFRRGRKKRIPYSKGQLRELEREYAANKFITKDKRRKISAATSLSERQITIWFQNRRVKEKKVLAKVKNSATP

SEQ ID NO: 109 - protein, 330 aa, synthetic construct
MTTSLLLHPRWPESLMYVYEDSAAESGIGGGGGGGGGGTGGAGGGCSGASPGKAPSMDGLGSSCPASHCRDLLPHPVLGRPPAPLGAPQGAVYTDIPAPEAARQCAPPPAPPTSSSATLGYGYPFGGSYYGCRLSHNVNLQQKPCAYHPGDKYPEPSGALPGDDLSSRAKEFAFYPSFASSYQAMPGYLDVSVVPGISGHPEPRHDALIPVEGYQHWALSNGWDSQVYCSKEQSQSAHLWKSPFPDVVPLQPEVSSYRRGRKKRVPYTKVQLKELEKEYAASKFITKEKRRRISATTNLSERQVTIWFQNRRVKEKKVVSKSKAPHLHST

SEQ ID NO: 110 - protein, 313 aa, synthetic construct
MDFDERGPCSSNMYLPSCTYYVSGPDFSSLPSFLPQTPSSRPMTYSYSSNLPQVQPVREVTFREYAIEPATKWHPRGNLAHCYSAEELVHRDCLQAPSAAGVPGDVLAKSSANVYHHPTPAVSSNFYSTVGRNGVLPQAFDQFFETAYGTPENLASSDYPGDKSAEKGPPAATATSAAAAAAATGAPATSSSDSGGGGGCRETAAAAEEKERRRRPESSSSPESSSGHTEDKAGGSSGQRTRKKRCPYTKYQIRELEREFFFSVYINKEKRLQLSRMLNLTDRQVKIWFQNRRMKEKKINRDRLQYYSANPLL

SEQ ID NO: 111 - protein, 304 aa, synthetic construct
MFNSVNLGNFCSPSRKERGADFGERGSCASNLYLPSCTYYMPEFSTVSSFLPQAPSRQISYPYSAQVPPVREVSYGLEPSGKWHHRNSYSSCYAAADELMHRECLPPSTVTEILMKNEGSYGGHHHPSAPHATPAGFYSSVNKNSVLPQAFDRFFDNAYCGGGDPPAEPPCSGKGEAKGEPEAPPASGLASRAEAGAEAEAEEENTNPSSSGSAHSVAKEPAKGAAPNAPRTRKKRCPYSKFQIRELEREFFFNVYINKEKRLQLSRMLNLTDRQVKIWFQNRRMKEKKLSRDRLQYFSGNPLL

SEQ ID NO: 112 - protein, 342 aa, synthetic construct
MTCPRNVTPNSYAEPLAAPGGGERYSRSAGMYMQSGSDFNCGVMRGCGLAPSLSKRDEGSSPSLALNTYPSYLSQLDSWGDPKAAYRLEQPVGRPLSSCSYPPSVKEENVCCMYSAEKRAKSGPEAALYSHPLPESCLGEHEVPVPSYYRASPSYSALDKTPHCSGANDFEAPFEQRASLNPRAEHLESPQLGGKVSFPETPKSDSQTPSPNEIKTEQSLAGPKGSPSESEKERAKAADSSPDTSDNEAKEEIKAENTTGNWLTAKSGRKKRCPYTKHQTLELEKEFLFNMYLTRERRLEISKTINLTDRQVKIWFQNRRMKLKKMNRENRIRELTSNFNFT

SEQ ID NO: 113 - protein, 410 aa, synthetic construct
MSARKGYLLPSPNYPTTMSCSESPAANSFLVDSLISSGRGEAGGGGGGAGGGGGGGYYAHGGVYLPPAADLPYGLQSCGLFPTLGGKRNEAASPGSGGGGGGLGPGAHGYGPSPIDLWLDAPRSCRMEPPDGPPPPPQQQPPPPPQPPQPAPQATSCSFAQNIKEESSYCLYDSADKCPKVSATAAELAPFPRGPPPDGCALGTSSGVPVPGYFRLSQAYGTAKGYGSGGGGAQQLGAGPFPAQPPGRGFDLPPALASGSADAARKERALDSPPPPTLACGSGGGSQGDEEAHASSSAAEELSPAPSESSKASPEKDSLGNSKGENAANWLTAKSGRKKRCPYTKHQTLELEKEFLFNMYLTRERRLEISRSVHLTDRQVKIWFQNRRMKLKKMNRENRIRELTANFNFS

SEQ ID NO: 114 - protein, 250 aa, synthetic construct
MSISGTLSSYYVDSIISHESEDAPPAKFPSGQYASSRQPGHAEHLEFPSCSFQPKAPVFGASWAPLSPHASGSLPSVYHPYIQPQGVPPAESRYLRTWLEPAPRGEAAPGQGQAAVKAEPLLGAPGELLKQGTPEYSLETSAGREAVLSNQRPGYGDNKICEGSEDKERPDQTNPSANWLHARSSRKKRCPYTKYQTLELEKEFLFNMYLTRDRRHEVARLLNLSERQVKIWFQNRRMKMKKMNKEQGKE

SEQ ID NO: 115 - protein, 272 aa, synthetic construct
MATTGALGNYYVDSFLLGADAADELSVGRYAPGTLGQPPRQAATLAEHPDFSPCSFQSKATVFGASWNPVHAAGANAVPAAVYHHHHHHPYVHPQAPVAAAAPDGRYMRSWLEPTPGALSFAGLPSSRPYGIKPEPLSARRGDCPTLDTHTLSLTDYACGSPPVDREKQPSEGAFSENNAENESGGDKPPIDPNNPAANWLHARSTRKKRCPYTKHQTLELEKEFLFNMYLTRDRRYEVARLLNLTERQVKIWFQNRRMKMKKINKDRAKDE

SEQ ID NO: 116 - protein, 80 aa, Homo sapiens
NKKLEAVGTGIEPKAMSQGLVTFGDVAVDFSQEEWEWLNPIQRNLYRKVMLENYRNLASLGLCVSKPDVISSLEQGKEPW

SEQ ID NO: 117 - protein, 80 aa, Homo sapiens
KMKKFQIPVSFQDLTVNFTQEEWQQLDPAQRLLYRDVMLENYSNLVSVGYHVSKPDVIFKLEQGEEPWIVEEFSNQNYPD

SEQ ID NO: 118 - protein, 80 aa, Homo sapiens
CSQESALSEEEEDTTRPLETVTFKDVAVDLTQEEWEQMKPAQRNLYRDVMLENYSNLVTVGCQVTKPDVIFKLEQEEEPW

SEQ ID NO: 119 - protein, 80 aa, Homo sapiens
ITSQGSVSFRDVTVGFTQEEWQHLDPAQRTLYRDVMLENYSHLVSVGYCIPKPEVILKLEKGEEPWILEEKFPSQSHLEL

SEQ ID NO: 120 - protein, 80 aa, Homo sapiens
PQVTFNDVAIDFTHEEWGWLSSAQRDLYKDVMVQNYENLVSVAGLSVTKPYVITLLEDGKEPWMMEKKLSKGMIPDWESR

SEQ ID NO: 121 - protein, 80 aa, Homo sapiens
PLRFSTLFQEQQKMNISQASVSFKDVTIEFTQEEWQQMAPVQKNLYRDVMLENYSNLVSVGYCCFKPEVIFKLEQGEEPW

SEQ ID NO: 122 - protein, 80 aa, Homo sapiens
QDPSAEGLSEEVPVVFEELPVVFEDVAVYFTREEWGMLDKRQKELYRDVMRMNYELLASLGPAAAKPDLISKLERRAAPW

SEQ ID NO: 123 - protein, 80 aa, Homo sapiens
SQGSVTFRDVAIDFSQEEWKWLQPAQRDLYRCVMLENYGHLVSLGLSISKPDVVSLLEQGKEPWLGKREVKRDLFSVSES

SEQ ID NO: 124 - protein, 80 aa, Homo sapiens
GSLTFRDVAIEFSLEEWQCLDTAQQNLYRNVMLENYRNLVFLGIAAFKPDLIIFLEEGKESWNMKRHEMVEESPVICSHF

SEQ ID NO: 125 - protein, 80 aa, Homo sapiens
NKSQEQVSFKDVCVDFTQEEWYLLDPAQKILYRDVILENYSNLVSVGYCITKPEVIFKIEQGEEPWILEKGFPSQCHPER

SEQ ID NO: 126 - protein, 80 aa, Homo sapiens
PHLLVTFRDVAIDFSQEEWECLDPAQRDLYRDVMLENYSNLISLDLESSCVTKKLSPEKEIYEMESLQWENMGKRINHHL

SEQ ID NO: 127 - protein, 80 aa, Homo sapiens
EEERKTAELQKNRIQDSVVFEDVAVDFTQEEWALLDLAQRNLYRDVMLENFQNLASLGYPLHTPHLISQWEQEEDLQTVK

SEQ ID NO: 128 - protein, 80 aa, Homo sapiens
GLLTFRDVAIEFSLEEWQCLDTAQKNLYRNVMLENYRNLAFLGIAVSKPDLIICLEKEKEPWNMKRDEMVDEPPGICPHF

SEQ ID NO: 129 - protein, 80 aa, Homo sapiens
RAPTQVTVSPETHMDLTKGCVTFEDIAIYFSQDEWGLLDEAQRLLYLEVMLENFALVASLGCGHGTEDEETPSDQNVSVG

SEQ ID NO: 130 - protein, 80 aa, Homo sapiens
AAVSPTTRCQESVTFEDVAVVFTDEEWSRLVPIQRDLYKEVMLENYNSIVSLGLPVPQPDVIFQLKRGDKPWMVDLHGSE

SEQ ID NO: 131 - protein, 80 aa, Homo sapiens
HSLEKVTFEDVAIDFTQEEWDMMDTSKRKLYRDVMLENISHLVSLGYQISKSYIILQLEQGKELWREGRVFLQDQNPDRE

SEQ ID NO: 132 - protein, 80 aa, Homo sapiens
DSVSFEDVAVNFTLEEWALLDSSQKKLYEDVMQETFKNLVCLGKKWEDQDIEDDHRNQGKNRRCHMVERLCESRRGSKCG

SEQ ID NO: 133 - protein, 80 aa, Homo sapiens
NVEVVKVMPQDLVTFKDVAIDFSQEEWQWMNPAQKRLYRSMMLENYQSLVSLGLCISKPYVISLLEQGREPWEMTSEMTR

SEQ ID NO: 134 - protein, 80 aa, Homo sapiens
TQPDEDLHLQAEETQLVKESVTFKDVAIDFTLEEWRLMDPTQRNLHKDVMLENYRNLVSLGLAVSKPDMISHLENGKGPW

SEQ ID NO: 135 - protein, 80 aa, Homo sapiens
TMLQESFSFDDLSVDFTQKEWQLLDPSQKNLYKDVMLENYSSLVSLGYEVMKPDVIFKLEQGEEPWVGDGEIPSSDSPEV

SEQ ID NO: 136 - protein, 80 aa, Homo sapiens
EVVTFGDVAVHFSREEWQCLDPGQRALYREVMLENHSSVAGLAGFLVFKPELISRLEQGEEPWVLDLQGAEGTEAPRTSK

SEQ ID NO: 137 - protein, 80 aa, Homo sapiens
RNAEEERMIAVFLTTWLQEPMTFKDVAVEFTQEEWMMLDSAQRSLYRDVMLENYRNLTSVEYQLYRLTVISPLDQEEIRN

SEQ ID NO: 138 - protein, 80 aa, Homo sapiens
GPQGARRQAFLAFGDVTVDFTQKEWRLLSPAQRALYREVTLENYSHLVSLGILHSKPELIRRLEQGEVPWGEERRRRPGP

SEQ ID NO: 139 - protein, 80 aa, Homo sapiens
HSLKKLTFEDVAIDFTQEEWAMMDTSKRKLYRDVMLENISHLVSLGYQISKSYIILQLEQGKELWREGRVFLQDQNPNRE

SEQ ID NO: 140 - protein, 80 aa, Homo sapiens
MPEVEFPDQFFTVLTMDHELVTLRDVVINFSQEEWEYLDSAQRNLYWDVMMENYSNLLSLDLESRNETKHLSVGKDIIQN

SEQ ID NO: 141 - protein, 80 aa, Homo sapiens
PGAPGSLEMGPLTFRDVTIEFSLEEWQCLDTVQQNLYRDVMLENYRNLVFLGMAVFKPDLITCLKQGKEPWNMKRHEMVT

SEQ ID NO: 142 - protein, 80 aa, Homo sapiens
RDPAQVPVAADLLTDHEEGYVTFEDVAVYFSQEEWRLLDDAQRLLYRNVMLENFTLLASLGLASSKTHEITQLESWEEPF

SEQ ID NO: 143 - protein, 80 aa, Homo sapiens
HSLKKVTFEDVAIDFTQEEWAMMDTSKRKLYRDVMLENISHLVSLGYQISKSYIILQLEQGKELWREGREFLQDQNPDRE

SEQ ID NO: 144 - protein, 80 aa, Homo sapiens
TKSKEAVTFKDVAVVFSEEELQLLDLAQRKLYRDVMLENFRNVVSVGHQSTPDGLPQLEREEKLWMMKMATQRDNSSGAK

SEQ ID NO: 145 - protein, 80 aa, Homo sapiens
SQVTFSDVAIDFSHEEWACLDSAQRDLYKDVMVQNYENLVSVGLSVTKPYVIMLLEDGKEPWMMEKKLSKAYPFPLSHSV

SEQ ID NO: 146 - protein, 80 aa, Homo sapiens
PGPLRSLEMESLQFRDVAVEFSLEEWHCLDTAQQNLYRDVMLENYRHLVFLGIIVSKPDLITCLEQGIKPLTMKRHEMIA

SEQ ID NO: 147 - protein, 80 aa, Homo sapiens
LQTTWPQESVTFEDVAVYFTQNQWASLDPAQRALYGEVMLENYANVASLVAFPFPKPALISHLERGEAPWGPDPWDTEIL

SEQ ID NO: 148 - protein, 80 aa, Homo sapiens
APLLAPRPGETRPGCRKPGTVSFADVAVYFSPEEWGCLRPAQRALYRDVMQETYGHLGALGFPGPKPALISWMEQESEAW

SEQ ID NO: 149 - protein, 80 aa, Homo sapiens
NKVEQKSQESVSFKDVTVGFTQEEWQHLDPSQRALYRDVMLENYSNLVSVGYCVHKPEVIFRLQQGEEPWKQEEEFPSQS

SEQ ID NO: 150 - protein, 80 aa, Homo sapiens
CFSQEERMAAGYLPRWSQELVTFEDVSMDFSQEEWELLEPAQKNLYREVMLENYRNVVSLEALKNQCTDVGIKEGPLSPA

SEQ ID NO: 151 - protein, 80 aa, Homo sapiens
DSVAFEDVAVNFTQEEWALLDPSQKNLYREVMQETLRNLTSIGKKWNNQYIEDEHQNPRRNLRRLIGERLSESKESHQHG

SEQ ID NO: 152 - protein, 80 aa, Homo sapiens
MGPAQVPMNSEVIVDPIQGQVNFEDVFVYFSQEEWVLLDEAQRLLYRDVMLENFALMASLGHTSFMSHIVASLVMGSEPW

SEQ ID NO: 153 - protein, 80 aa, Homo sapiens
TTFKEAMTFKDVAVVFTEEELGLLDLAQRKLYRDVMLENFRNLLSVGHQAFHRDTFHFLREEKIWMMKTAIQREGNSGDK

SEQ ID NO: 154 - protein, 80 aa, Homo sapiens
DSTLLQGGHNLLSSASFQEAVTFKDVIVDFTQEEWKQLDPGQRDLFRDVTLENYTHLVSIGLQVSKPDVISQLEQGTEPW

SEQ ID NO: 155 - protein, 80 aa, Homo sapiens
EARSMLVPPQASVCFEDVAMAFTQEEWEQLDLAQRTLYREVTLETWEHIVSLGLFLSKSDVISQLEQEEDLCRAEQEAPR

SEQ ID NO: 156 - protein, 80 aa, Homo sapiens
DSVVFEDVAVDFTLEEWALLDSAQRDLYRDVMLETFRNLASVDDGTQFKANGSVSLQDMYGQEKSKEQTIPNFTGNNSCA

SEQ ID NO: 157 - protein, 80 aa, Homo sapiens
EESHGALISSCNSRTMTDGLVTFRDVAIDFSQEEWECLDPAQRDLYVDVMLENYSNLVSLDLESKTYETKKIFSENDIFE

SEQ ID NO: 158 - protein, 80 aa, Homo sapiens
VITPQIPMVTEEFVKPSQGHVTFEDIAVYFSQEEWGLLDEAQRCLYHDVMLENFSLMASVGCLHGIEAEEAPSEQTLSAQ

SEQ ID NO: 159 - protein, 80 aa, Homo sapiens
VQLRPQTRMATALRDPASGSVTFEDVAVYFSWEEWDLLDEAQKHLYFDVMLENFALTSSLGCWCGVEHEETPSEQRISGE

SEQ ID NO: 160 - protein, 80 aa, Homo sapiens
MQAQESLTLEDVAVDFTWEEWQFLSPAQKDLYRDVMLENYSNLVAVGYQASKPDALSKLERGEETCTTEDEIYSRICSEI

SEQ ID NO: 161 - protein, 80 aa, Homo sapiens
GPLQFRDVAIEFSLEEWHCLDTAQRNLYRDVMLENYRNLVFLGIVVSKPDLVTCLEQGKKPLTMERHEMIAKPPVMSSHF

SEQ ID NO: 162 - protein, 80 aa, Homo sapiens
NMFKEAVTFKDVAVAFTEEELGLLGPAQRKLYRDVMVENFRNLLSVGHPPFKQDVSPIERNEQLWIMTTATRRQGNLGEK

SEQ ID NO: 163 - protein, 80 aa, Homo sapiens
GALTFRDVAIEFSLEEWQCLDTEQQNLYRNVMLDNYRNLVFLGIAVSKPDLITCLEQEKEPWNLKTHDMVAKPPVICSHI

SEQ ID NO: 164 - protein, 80 aa, Homo sapiens
SPQKSSALAPEDHGSSYEGSVSFRDVAIDFSREEWRHLDPSQRNLYRDVMLETYSHLLSVGYQVPEAEVVMLEQGKEPWA

SEQ ID NO: 165 - protein, 80 aa, Homo sapiens
ELLTFRDVAIEFSPEEWKCLDPAQQNLYRDVMLENYRNLISLGVAISNPDLVIYLEQRKEPYKVKIHETVAKHPAVCSHF

SEQ ID NO: 166 - protein, 80 aa, Homo sapiens
EPLKFRDVAIEFSLEEWQCLDTIQQNLYRNVMLENYRNLVFLGIVVSKPDLITCLEQEKEPWTRKRHRMVAEPPVICSHF

SEQ ID NO: 167 - protein, 80 aa, Homo sapiens
PSARGKSKSKAPITFGDLAIYFSQEEWEWLSPIQKDLYEDVMLENYRNLVSLGLSFRRPNVITLLEKGKAPWMVEPVRRR

SEQ ID NO: 168 - protein, 80 aa, Homo sapiens
TKAQESLTLEDVAVDFTWEEWQFLSPAQKDLYRDVMLENYSNLVSVGYQAGKPDALTKLEQGEPLWTLEDEIHSPAHPEI

SEQ ID NO: 169 - protein, 80 aa, Homo sapiens
SQEEVEVAGIKLCKAMSLGSVTFTDVAIDFSQDEWEWLNLAQRSLYKKVMLENYRNLVSVGLCISKPDVISLLEQEKDPW

SEQ ID NO: 170 - protein, 80 aa, Homo sapiens
TKSLESVSFKDVTVDFSRDEWQQLDLAQKSLYREVMLENYFNLISVGCQVPKPEVIFSLEQEEPCMLDGEIPSQSRPDGD

SEQ ID NO: 171 - protein, 80 aa, Homo sapiens
SGCPGAERNLLVYSYFEKETLTFRDVAIEFSLEEWECLNPAQQNLYMNVMLENYKNLVFLGVAVSKQDPVTCLEQEKEPW

SEQ ID NO: 172 - protein, 80 aa, Homo sapiens
PLQGSVSFKDVTVDFTQEEWQQLDPAQKALYRDVMLENYCHFVSVGFHMAKPDMIRKLEQGEELWTQRIFPSYSYLEEDG

SEQ ID NO: 173 - protein, 80 aa, Homo sapiens
PGPPRSLEMGLLTFRDVAIEFSLEEWQHLDIAQQNLYRNVMLENYRNLAFLGIAVSKPDLITCLEQGKEPWNMKRHEMVD

SEQ ID NO: 174 - protein, 80 aa, Homo sapiens
SGHPGSWEMNSVAFEDVAVNFTQEEWALLDPSQKNLYRDVMQETFRNLASIGNKGEDQSIEDQYKNSSRNLRHIISHSGN

SEQ ID NO: 175 - protein, 80 aa, Homo sapiens
SYGSITFGDVAIDFSHQEWEYLSLVQKTLYQEVMMENYDNLVSLAGHSVSKPDLITLLEQGKEPWMIVREETRGECTDLD

SEQ ID NO: 176 - protein, 80 aa, Homo sapiens
DLFVCSGLEPHTPSVGSQESVTFQDVAVDFTEKEWPLLDSSQRKLYKDVMLENYSNLTSLGYQVGKPSLISHLEQEEEPR

SEQ ID NO: 177 - protein, 80 aa, Homo sapiens
FQTAWRQEPVTFEDVAVYFTQNEWASLDSVQRALYREVMLENYANVASLAFPFTTPVLVSQLEQGELPWGLDPWEPMGRE

SEQ ID NO: 178 - protein, 80 aa, Homo sapiens
ELLTFRDVAIEFSPEEWKCLDPDQQNLYRDVMLENYRNLVSLGVAISNPDLVTCLEQRKEPYNVKIHKIVARPPAMCSHF

SEQ ID NO: 179 - protein, 80 aa, Homo sapiens
AGEAEAQLDPSLQGLVMFEDVTVYFSREEWGLLNVTQKGLYRDVMLENFALVSSLGLAPSRSPVFTQLEDDEQSWVPSWV

SEQ ID NO: 180 - protein, 80 aa, Homo sapiens
AHALVTFRDVAIDFSQKEWECLDTTQRKLYRDVMLENYNNLVSLGYSGSKPDVITLLEQGKEPCVVARDVTGRQCPGLLS

SEQ ID NO: 181 - protein, 80 aa, Homo sapiens
KRIKHWKMASKLILPESLSLLTFEDVAVYFSEEEWQLLNPLEKTLYNDVMQDIYETVISLGLKLKNDTGNDHPISVSTSE

SEQ ID NO: 182 - protein, 80 aa, Homo sapiens
DSVVFEDVAVDFTLEEWALLDSAQRDLYRDVMLETFQNLASVDDETQFKASGSVSQQDIYGEKIPKESKIATFTRNVSWA

SEQ ID NO: 183 - protein, 80 aa, Homo sapiens
NMSQASVSFQDVTVEFTREEWQHLGPVERTLYRDVMLENYSHLISVGYCITKPKVISKLEKGEEPWSLEDEFLNQRYPGY

SEQ ID NO: 184 - protein, 80 aa, Homo sapiens
ISFQESVTFQDVAVDFTAEEWQLLDCAERTLYWDVMLENYRNLISVGCPITKTKVILKVEQGQEPWMVEGANPHESSPES

SEQ ID NO: 185 - protein, 80 aa, Homo sapiens
NTLQGPVSFKDVAVDFTQEEWQQLDPDEKITYRDVMLENYSHLVSVGYDTTKPNVIIKLEQGEEPWIMGGEFPCQHSPEA

SEQ ID NO: 186 - protein, 80 aa, Homo sapiens
HPEEEERMHDELLQAVSKGPVMFRDVSIDFSQEEWECLDADQMNLYKEVMLENFSNLVSVGLSNSKPAVISLLEQGKEPW

SEQ ID NO: 187 - protein, 80 aa, Homo sapiens
SLGSELFRDVAIVFSQEEWQWLAPAQRDLYRDVMLETYSNLVSLGLAVSKPDVISFLEQGKEPWMVERVVSGGLCPVLES

SEQ ID NO: 188 - protein, 80 aa, Homo sapiens
TKFQEMVTFKDVAVVFTEEELGLLDSVQRKLYRDVMLENFRNLLLVAHQPFKPDLISQLEREEKLLMVETETPRDGCSGR

SEQ ID NO: 189 - protein, 80 aa, Homo sapiens
AKRPGPPGSREMGLLTFRDIAIEFSLAEWQCLDHAQQNLYRDVMLENYRNLVSLGIAVSKPDLITCLEQNKEPQNIKRNE

SEQ ID NO: 190 - protein, 80 aa, Homo sapiens
TCMVHRQTMSCSGAGGITAFVAFRDVAVYFTQEEWRLLSPAQRTLHREVMLETYNHLVSLEIPSSKPKLIAQLERGEAPW

SEQ ID NO: 191 - protein, 80 aa, Homo sapiens
IQAQESITLEDVAVDFTWEEWQLLGAAQKDLYRDVMLENYSNLVAVGYQASKPDALFKLEQGEQLWTIEDGIHSGACSDI

SEQ ID NO: 192 - protein, 80 aa, Homo sapiens
AQKRRKRKAKESGMALPQGHLTFRDVAIEFSQAEWKCLDPAQRALYKDVMLENYRNLVSLGISLPDLNINSMLEQRREPW

SEQ ID NO: 193 - protein, 80 aa, Homo sapiens
DSTSVPVTAEAKLMGFTQGCVTFEDVAIYFSQEEWGLLDEAQRLLYRDVMLENFALITALVCWHGMEDEETPEQSVSVEG

SEQ ID NO: 194 - protein, 80 aa, Homo sapiens
GPLTFRDVKIEFSLEEWQCLDTAQRNLYRDVMLENYRNLVFLGIAVSKPDLITWLEQGKEPWNLKRHEMVDKTPVMCSHF

SEQ ID NO: 195 - protein, 80 aa, Homo sapiens
SGCPGAERSLLVQSYFEKGPLTFRDVAIEFSLEEWQCLDSAQQGLYRKVMLENYRNLVFLAGIALTKPDLITCLEQGKEP

SEQ ID NO: 196 - protein, 80 aa, Homo sapiens
GVLTFRDVAVEFSPEEWECLDSAQQRLYRDVMLENYGNLVSLGLAIFKPDLMTCLEQRKEPWKVKRQEAVAKHPAGSFHF

SEQ ID NO: 197 - protein, 80 aa, Homo sapiens
KENLEDISGWGLPEARSKESVSFKDVAVDFTQEEWGQLDSPQRALYRDVMLENYQNLLALGPPLHKPDVISHLERGEEPW

SEQ ID NO: 198 - protein, 80 aa, Homo sapiens
EESEKPRGFARGLEPERIIGATDSSGELMFLMKWKNSDEADLVPAKEANVKCPQVVISFYEERLTWHSYPSEDDDKKDDK

SEQ ID NO: 199 - protein, 80 aa, Homo sapiens
ASVALEDVAVNFTREEWALLGPCQKNLYKDVMQETIRNLDCVVMKWKDQNIEDQYRYPRKNLRCRMLERFVESKDGTQCG

SEQ ID NO: 200 - protein, 80 aa, Homo sapiens
TLLTFRDVAIEFSLEEWKCLDLAQQNLYRDVMLENYRNLFSVGLTVCKPGLITCLEQRKEPWNVKRQEAADGHPEMGFHH

SEQ ID NO: 201 - protein, 80 aa, Homo sapiens
AAALRAPTQQVFVAFEDVAIYFSQEEWELLDEMQRLLYRDVMLENFAVMASLGCWCGAVDEGTPSAESVSVEELSQGRTP

SEQ ID NO: 202 - protein, 80 aa, Homo sapiens
NTFQASVSFQDVTVEFSQEEWQHMGPVERTLYRDVMLENYSHLVSVGYCFTKPELIFTLEQGEDPWLLEKEKGFLSRNSP

SEQ ID NO: 203 - protein, 80 aa, Homo sapiens
DSVAFEDVSVSFSQEEWALLAPSQKKLYRDVMQETFKNLASIGEKWEDPNVEDQHKNQGRNLRSHTGERLCEGKEGSQCA

SEQ ID NO: 204 - protein, 80 aa, Homo sapiens
AQGLVTFADVAIDFSQEEWACLNSAQRDLYWDVMLENYSNLVSLDLESAYENKSLPTEKNIHEIRASKRNSDRRSKSLGR

SEQ ID NO: 205 - protein, 80 aa, Homo sapiens
AVDLLSAQEPVTFRDVAVFFSQDEWLHLDSAQRALYREVMLENYSSLVSLGIPFSMPKLIHQLQQGEDPCMVEREVPSDT

SEQ ID NO: 206 - protein, 80 aa, Homo sapiens
SPQRFPALIPGEPGRSFEGSVSFEDVAVDFTRQEWHRLDPAQRTMHKDVMLETYSNLASVGLCVAKPEMIFKLERGEELW

SEQ ID NO: 207 - protein, 80 aa, Homo sapiens
RVLTFRDVAVEFSPEEWECLDSAQQRLYRDVMLENYGNLFSLGLAIFKPDLITYLEQRKEPWNARRQKTVAKHPAGSLHF

SEQ ID NO: 208 - protein, 80 aa, Homo sapiens
AETKDAAQMLVTFKDVAVTFTREEWRQLDLAQRTLYREVMLETCGLLVSLGHRVPKPELVHLLEHGQELWIVKRGLSHAT

SEQ ID NO: 209 - protein, 80 aa, Homo sapiens
IEYQIPVSFKDVVVGFTQEEWHRLSPAQRALYRDVMLETYSNLVSVGYEGTKPDVILRLEQEEAPWIGEAACPGCHCWED

SEQ ID NO: 210 - protein, 80 aa, Homo sapiens
TKFQEAVTFKDVAVAFTEEELGLLDSAQRKLYRDVMLENFRNLVSVGHQSFKPDMISQLEREEKLWMKELQTQRGKHSGD

SEQ ID NO: 211 - protein, 80 aa, Homo sapiens
DEGVAGVMSVGPPAARLQEPVTFRDVAVDFTQEEWGQLDPTQRILYRDVMLETFGHLLSIGPELPKPEVISQLEQGTELW

SEQ ID NO: 212 - protein, 80 aa, Homo sapiens
GPLTFMDVAIEFSVEEWQCLDTAQQNLYRNVMLENYRNLVFLGIAVSKPDLITCLEQGKEPWNMERHEMVAKPPGMCCYF

SEQ ID NO: 213 - protein, 80 aa, Homo sapiens
HQVGLIRSYNSKTMTCFQELVTFRDVAIDFSRQEWEYLDPNQRDLYRDVMLENYRNLVSLGGHSISKPVVVDLLERGKEP

SEQ ID NO: 214 - protein, 80 aa, Homo sapiens
NATIVMSVRREQGSSSGEGSLSFEDVAVGFTREEWQFLDQSQKVLYKEVMLENYINLVSIGYRGTKPDSLFKLEQGEPPG

SEQ ID NO: 215 - protein, 80 aa, Homo sapiens
FPPARGKELLSFEDVAMYFTREEWGHLNWGQKDLYRDVMLENYRNMVLLGFQFPKPEMICQLENWDEQWILDLPRTGNRK

SEQ ID NO: 216 - protein, 80 aa, Homo sapiens
ELLTFKDVAIEFSPEEWKCLDTSQQNLYRDVMLENYRNLVSLGVSISNPDLVTSLEQRKEPYNLKIHETAARPPAVCSHF

SEQ ID NO: 217 - protein, 80 aa, Homo sapiens
MKSQGLVSFKDVAVDFTQEEWQQLDPSQRTLYRDVMLENYSHLVSMGYPVSKPDVISKLEQGEEPWIIKGDISNWIYPDE

SEQ ID NO: 218 - protein, 80 aa, Homo sapiens
AEGSVMFSDVSIDFSQEEWDCLDPVQRDLYRDVMLENYGNLVSMGLYTPKPQVISLLEQGKEPWMVGRELTRGLCSDLES

SEQ ID NO: 219 - protein, 80 aa, Homo sapiens
GPLTFTDVAIEFSLEEWQCLDTAQQNLYRNVMLENYRNLVFLGIAVSKPDLITCLEKEKEPCKMKRHEMVDEPPVVCSHF

SEQ ID NO: 220 - protein, 80 aa, Homo sapiens
ALSQGLFTFKDVAIEFSQEEWECLDPAQRALYRDVMLENYRNLLSLDEDNIPPEDDISVGFTSKGLSPKENNKEELYHLV

SEQ ID NO: 221 - protein, 80 aa, Homo sapiens
NMEGLVMFQDLSIDFSQEEWECLDAAQKDLYRDVMMENYSSLVSLGLSIPKPDVISLLEQGKEPWMVSRDVLGGWCRDSE

SEQ ID NO: 222 - protein, 80 aa, Homo sapiens
AVSHLPTMVQESVTFKDVAILFTQEEWGQLSPAQRALYRDVMLENYSNLVSLGLLGPKPDTFSQLEKREVWMPEDTPGGF

SEQ ID NO: 223 - protein, 80 aa, Homo sapiens
GPLTIRDVTVEFSLEEWHCLDTAQQNLYRDVMLENYRNLVFLGIAVSKPDLITCLEQGKEPCNMKRHEMVAKPPVMCSHI

SEQ ID NO: 224 - protein, 80 aa, Homo sapiens
AAAVLTDRAQVSVTFDDVAVTFTKEEWGQLDLAQRTLYQEVMLENCGLLVSLGCPVPKAELICHLEHGQEPWTRKEDLSQ

SEQ ID NO: 225 - protein, 80 aa, Homo sapiens
ALRSVMFSDVSIDFSPEEWEYLDLEQKDLYRDVMLENYSNLVSLGCFISKPDVISSLEQGKEPWKVVRKGRRQYPDLETK

SEQ ID NO: 226 - protein, 80 aa, Homo sapiens
AHGSVTFRDVAIDFSQEEWEFLDPAQRDLYRDVMWENYSNFISLGPSISKPDVITLLDEERKEPGMVVREGTRRYCPDLE

SEQ ID NO: 227 - protein, 80 aa, Homo sapiens
APRAQIQGPLTFGDVAVAFTRIEWRHLDAAQRALYRDVMLENYGNLVSVGLLSSKPKLITQLEQGAEPWTEVREAPSGTH

SEQ ID NO: 228 - protein, 80 aa, Homo sapiens
GPLQFRDVAIEFSLEEWHCLDTAQRNLYRNVMLENYRNLVFLGIVVSKPDLITCLEQGKKPLTMKKHEMVANPSVTCSHF

SEQ ID NO: 229 - protein, 80 aa, Homo sapiens
TLPRGQPEVLEWGLPKDQDSVAFEDVAVNFTHEEWALLGPSQKNLYRDVMRETIRNLNCIGMKWENQNIDDQHQNLRRNP

SEQ ID NO: 230 - protein, 80 aa, Homo sapiens
PSPDSMTFEDIIVDFTQEEWALLDTSQRKLFQDVMLENISHLVSIGKQLCKSVVLSQLEQVEKLSTQRISLLQGREVGIK

SEQ ID NO: 231 - protein, 80 aa, Homo sapiens
EESREIRAGQIVLKAMAQGLVTFRDVAIEFSLEEWKCLEPAQRDLYREVTLENFGHLASLGLSISKPDVVSLLEQGKEPW

SEQ ID NO: 232 - protein, 80 aa, Homo sapiens
AASAQVSVTFEDVAVTFTQEEWGQLDAAQRTLYQEVMLETCGLLMSLGCPLFKPELIYQLDHRQELWMATKDLSQSSYPG

SEQ ID NO: 233 - protein, 80 aa, Homo sapiens
RESLEDEVTPGLPTAESQELLTFKDISIDFTQEEWGQLAPAHQNLYREVMLENYSNLVSVGYQLSKPSVISQLEKGEEPW

SEQ ID NO: 234 - protein, 80 aa, Homo sapiens
EGEYIKLKVIGQDSSEIHFKVKMTTHLKKLKESYCQRQGVPMNSLRFLFEGQRIADNHTPKELGMEEEDVIEVYQEQTGG

SEQ ID NO: 235 - protein, 80 aa, Homo sapiens
NKSLGPVSFKDVAVDFTQEEWQQLDPEQKITYRDVMLENYSNLVSVGYHIIKPDVISKLEQGEEPWIVEGEFLLQSYPDE

SEQ ID NO: 236 - protein, 80 aa, Homo sapiens
SPGLLTTRKEALMAFRDVAVAFTQKEWKLLSSAQRTLYREVMLENYSHLVSLGIAFSKPKLIEQLEQGDEPWREENEHLL

SEQ ID NO: 237 - protein, 80 aa, Homo sapiens
MFQDSVAFEDVAVTFTQEEWALLDPSQKNLCRDVMQETFRNLASIGKKWKPQNIYVEYENLRRNLRIVGERLFESKEGHQ

SEQ ID NO: 238 - protein, 80 aa, Homo sapiens
ENDHINLKVAGQDGSVVQFKIKRHTPLSKLMKAYCERQGLSMRQIRFRFDGQPINETDTPAQLEMEDEDTIDVFQQQTGG

SEQ ID NO: 239 - protein, 80 aa, Homo sapiens
PGPLGSLEMGVLTFRDVALEFSLEEWQCLDTAQQNLYRNVMLENYRNLVFVGIAASKPDLITCLEQGKEPWNVKRHEMVT

SEQ ID NO: 240 - protein, 80 aa, Homo sapiens
LSQKPQVLGPEKQDGSCEASVSFEDVTVDFSREEWQQLDPAQRCLYRDVMLELYSHLFAVGYHIPNPEVIFRMLKEKEPR

SEQ ID NO: 241 - protein, 80 aa, Homo sapiens
ALTQGQVTFRDVAIEFSQEEWTCLDPAQRTLYRDVMLENYRNLASLGISCFDLSIISMLEQGKEPFTLESQVQIAGNPDG

SEQ ID NO: 242 - protein, 80 aa, Homo sapiens
NKFQGPVTLKDVIVEFTKEEWKLLTPAQRTLYKDVMLENYSHLVSVGYHVNKPNAVFKLKQGKEPWILEVEFPHRGFPED

SEQ ID NO: 243 - protein, 80 aa, Homo sapiens
ELLTFRDVAIEFSPEEWKCLDPAQQNLYRDVMLENYRNLVSLAVYSYYNQGILPEQGIQDSFKKATLGRYGSCGLENICL

SEQ ID NO: 244 - protein, 80 aa, Homo sapiens
SPQKSSALAPEDHGSSYEGSVSFRDVAIDFSREEWRHLDLSQRNLYRDVMLETYSHLLSVGYQVPKPEVVMLEQGKEPWA

SEQ ID NO: 245 - protein, 80 aa, Homo sapiens
NNSQGRVTFEDVTVNFTQGEWQRLNPEQRNLYRDVMLENYSNLVSVGQGETTKPDVILRLEQGKEPWLEEEEVLGSGRAE

SEQ ID NO: 246 - protein, 80 aa, Homo sapiens
AMALPMPGPQEAVVFEDVAVYFTRIEWSCLAPDQQALYRDVMLENYGNLASLGFLVAKPALISLLEQGEEPGALILQVAE

SEQ ID NO: 247 - protein, 80 aa, Homo sapiens
DSSQHLVTFEDVAVDFTQEEWTLLDQAQRDLYRDVMLENYKNLIILAGSELFKRSLMSGLEQMEELRTGVTGVLQELDLQ

SEQ ID NO: 248 - protein, 80 aa, Homo sapiens
TTFKEAVTFKDVAVFFTEEELGLLDPAQRKLYQDVMLENFTNLLSVGHQPFHPFHFLREEKFWMMETATQREGNSGGKTI

SEQ ID NO: 249 - protein, 80 aa, Homo sapiens
GPLQFRDVAIEFSLEEWHCLDMAQRNLYRDVMLENYRNLVFLGIVVSKPDLITHLEQGKKPSTMQRHEMVANPSVLCSHF

SEQ ID NO: 250 - protein, 80 aa, Homo sapiens
NKSQGSVSFTDVTVDFTQEEWEQLDPSQRILYMDVMLENYSNLLSVEVWKADDQMERDHRNPDEQARQFLILKNQTPIEE

SEQ ID NO: 251 - protein, 80 aa, Homo sapiens
EEEEMNDGSQMVRSQESLTFQDVAVDFTREEWDQLYPAQKNLYRDVMLENYRNLVALGYQLCKPEVIAQLELEEEWVIER

SEQ ID NO: 252 - protein, 80 aa, Homo sapiens
EEATKKSKEKEPGMALPQGRLTFRDVAIEFSLEEWKCLNPAQRALYRAVMLENYRNLEFVDSSLKSMMEFSSTRHSITGE

SEQ ID NO: 253 - protein, 80 aa, Homo sapiens
EKTPAGRIVADCLTDCYQDSVTFDDVAVDFTQEEWTLLDSTQRSLYSDVMLENYKNLATVGGQIIKPSLISWLEQEESRT

SEQ ID NO: 254 - protein, 80 aa, Homo sapiens
AMSQESLTFKDVFVDFTLEEWQQLDSAQKNLYRDVMLENYSHLVSVGHLVGKPDVIFRLGPGDESWMADGGTPVRTCAGE

SEQ ID NO: 255 - protein, 80 aa, Homo sapiens
DSVAFEDVAVNFTLEEWALLDPSQKNLYRDVMRETFRNLASVGKQWEDQNIEDPFKIPRRNISHIPERLCESKEGGQGEE

SEQ ID NO: 256 - protein, 80 aa, Homo sapiens
MFQDSVAFEDVAVSFTQEEWALLDPSQKNLYRDVMQETFKNLTSVGKTWKVQNIEDEYKNPRRNLSLMREKLCESKESHH

SEQ ID NO: 257 - protein, 80 aa, Homo sapiens
AVVATLRLSAQGTVTFEDVAVKFTQEEWNLLSEAQRCLYRDVTLENLALMSSLGCWCGVEDEAAPSKQSIYIQRETQVRT

SEQ ID NO: 258 - protein, 80 aa, Homo sapiens
EEEEEDEDEDDLLTAGCQELVTFEDVAVYFSLEEWERLEADQRGLYQEVMQENYGILVSLGYPIPKPDLIFRLEQGEEPW

SEQ ID NO: 259 - protein, 80 aa, Homo sapiens
TKFQEMVTFKDVAVVFTREELGLLDLAQRKLYQDVMLENFRNLLSVGYQPFKLDVILQLGKEDKLRMMETEIQGDGCSGH

SEQ ID NO: 260 - protein, 80 aa, Homo sapiens
EEAAQKRKGKEPGMALPQGRLTFRDVAIEFSLAEWKCLNPSQRALYREVMLENYRNLEAVDISSKCMMKEVLSTGQGNTE

SEQ ID NO: 261 - protein, 80 aa, Homo sapiens
DTVVFEDVVVDFTLEEWALLNPAQRKLYRDVMLETFKHLASVDNEAQLKASGSISQQDTSGEKLSLKQKIEKFTRKNIWA

SEQ ID NO: 262 - protein, 80 aa, Homo sapiens
TTFKEGLTFKDVAVVFTEEELGLLDPVQRNLYQDVMLENFRNLLSVGHHPFKHDVFLLEKEKKLDIMKTATQRKGKSADK

SEQ ID NO: 263 - protein, 80 aa, Homo sapiens
SALQQEFWKIQTSNGIQMDLVTFDSVAVEFTQEEWTLLDPAQRNLYSDVMLENYKNLSSVGYQLFKPSLISWLEEEEELS

SEQ ID NO: 264 - protein, 80 aa, Homo sapiens
DCVIFEEVAVNFTPEEWALLDHAQRSLYRDVMLETCRNLASLDCYIYVRTSGSSSQRDVFGNGISNDEEIVKFTGSDSWS

SEQ ID NO: 265 - protein, 80 aa, Homo sapiens
ELLTFRDVTIEFSLEEWEFLNPAQQSLYRKVMLENYRNLVSLGLTVSKPELISRLEQRQEPWNVKRHETIAKPPAMSSHY

SEQ ID NO: 266 - protein, 80 aa, Homo sapiens
IKTQESLTLEDVAVEFSWEEWQLLDTAQKNLYRDVMVENYNHLVSLGYQTSKPDVLSKLAHGQEPWTTDAKIQNKNCPGI

SEQ ID NO: 267 - protein, 80 aa, Homo sapiens
PAHVPGEAGPRRTRESRPGAVSFADVAVYFSPEEWECLRPAQRALYRDVMRETFGHLGALGFSVPKPAFISWVEGEVEAW

SEQ ID NO: 268 - protein, 80 aa, Homo sapiens
GCPGDQVTPTRSLTAQLQETMTFKDVEVTFSQDEWGWLDSAQRNLYRDVMLENYRNMASLVGPFTKPALISWLEAREPWG

SEQ ID NO: 269 - protein, 80 aa, Homo sapiens
ARDLVMFRDVAVDFSQEEWECLNSYQRNLYRDVILENYSNLVSLAGCSISKPDVITLLEQGKEPWMVVRDEKRRWTLDLE

SEQ ID NO: 270 - protein, 80 aa, Homo sapiens
TTLKEAVTFKDVAVVFTEEELRLLDLAQRKLYREVMLENFRNLLSVGHQSLHRDTFHFLKEEKFWMMETATQREGNLGGK

SEQ ID NO: 271 - protein, 80 aa, Homo sapiens
SPPSPRSSMAAVALRDSAQGMTFEDVAIYFSQEEWELLDESQRFLYCDVMLENFAHVTSLGYCHGMENEAIASEQSVSIQ

SEQ ID NO: 272 - protein, 80 aa, Homo sapiens
DEEAQKRKAKESGMALPQGRLTFMDVAIEFSQEEWKSLDPGQRALYRDVMLENYRNLVFLGICLPDLSIISMLKQRREPL

SEQ ID NO: 273 - protein, 80 aa, Homo sapiens
ALTQGPLKFMDVAIEFSQEEWKCLDPAQRTLYRDVMLENYRNLVSLGICLPDLSVTSMLEQKRDPWTLQSEEKIANDPDG

SEQ ID NO: 274 - protein, 80 aa, Homo sapiens
TMFKEAVTFKDVAVVFTEEELGLLDVSQRKLYRDVMLENFRNLLSVGHQLSHRDTFHFQREEKFWIMETATQREGNSGGK

SEQ ID NO: 275 - protein, 80 aa, Homo sapiens
QGTVAFEDVAVNFSQEEWSLLSEVQRCLYHDVMLENWVLISSLGCWCGSEDEEAPSKKSISIQRVSQVSTPGAGVSPKKA

SEQ ID NO: 276 - protein, 80 aa, Homo sapiens
AEAFGDSEEDGEDVFEVEKILDMKTEGGKVLYKVRWKGYTSDDDTWEPEIHLEDCKEVLLEFRKKIAENKAKAVRKDIQR

SEQ ID NO: 277 - protein, 80 aa, Homo sapiens
VLQMQNSEHHGQSIKTQTDSISLEDVAVNFTLEEWALLDPGQRNIYRDVMRATFKNLACIGEKWKDQDIEDEHKNQGRNL

SEQ ID NO: 278 - protein, 80 aa, Homo sapiens
AMALTDPAQVSVTFDDVAVTFTQEEWGQLDLAQRTLYQEVMLENCGLLVSLGCPVPRPELIYHLEHGQEPWTRKEDLSQG

SEQ ID NO: 279 - protein, 80 aa, Homo sapiens
VHGSVTFRDVAIDFSQEEWECLQPDQRTLYRDVMLENYSHLISLGSSISKPDVITLLEQEKEPWIVVSKETSRWYPDLES

SEQ ID NO: 280 - protein, 80 aa, Homo sapiens
DPVACEDVAVNFTQEEWALLDISQRKLYREVMLETFRNLTSIGKKWKDQNIEYEYQNPRRNFRSLIEGNVNEIKEDSHCG

SEQ ID NO: 281 - protein, 80 aa, Homo sapiens
IKFQERVTFKDVAVVFTKEELALLDKAQINLYQDVMLENFRNLMLVRDGIKNNILNLQAKGLSYLSQEVLHCWQIWKQRI

SEQ ID NO: 282 - protein, 80 aa, Homo sapiens
GPLTFRDVAIEFSLKEWQCLDTAQRNLYRNVMLENYRNLVFLGITVSKPDLITCLEQGKEAWSMKRHEIMVAKPTVMCSH

SEQ ID NO: 283 - protein, 80 aa, Homo sapiens
TMSKEAVTFKDVAVVFTEEELGLLDLAQRKLYRDVMLENFRNLLSVGHQPFHRDTFHFLREEKFWMMDIATQREGNSGGK

SEQ ID NO: 284 - protein, 80 aa, Homo sapiens
GPLEFRDVAIEFSLEEWHCLDTAQQNLYRDVMLENYRHLVFLGIVVTKPDLITCLEQGKKPFTVKRHEMIAKSPVMCFHF

SEQ ID NO: 285 - protein, 80 aa, Homo sapiens
GHTEGGELVNELLKSWLKGLVTFEDVAVEFTQEEWALLDPAQRTLYRDVMLENCRNLASLGNQVDKPRLISQLEQEDKVM

SEQ ID NO: 286 - protein, 80 aa, Homo sapiens
AEPASVTVTFDDVALYFSEQEWEILEKWQKQMYKQEMKTNYETLDSLGYAFSKPDLITWMEQGRMLLISEQGCLDKTRRT

SEQ ID NO: 287 - protein, 80 aa, Homo sapiens
HSQASAISQDREEKIMSQEPLSFKDVAVVFTEEELELLDSTQRQLYQDVMQENFRNLLSVGERNPLGDKNGKDTEYIQDE

SEQ ID NO: 288 - protein, 80 aa, Homo sapiens
GSLEEGRRATGLPAAQVQEPVTFKDVAVDFTQEEWGQLDLVQRTLYRDVMLETYGHLLSVGNQIAKPEVISLLEQGEEPW

SEQ ID NO: 289 - protein, 80 aa, Homo sapiens
TTFKEAVTFKDVAVVFTEEELGLLDPAQRKLYRDVMLENFRNLLSVGHQPFHQDTCHFLREEKFWMMGTATQREGNSGGK

SEQ ID NO: 290 - protein, 80 aa, Homo sapiens
AKLYEAVTFKDVAVIFTEEELGLLDPAQRKLYRDVMLENFRNLLSVGGKIQTEMETVPEAGTHEEFSCKQIWEQIASDLT

SEQ ID NO: 291 - protein, 80 aa, Homo sapiens
RSDLFLPDSQTNEERKQYDSVAFEDVAVNFTQEEWALLGPSQKSLYRDVMWETIRNLDCIGMKWEDTNIEDQHRNPRRSL

SEQ ID NO: 292 - protein, 80 aa, Homo sapiens
PGTPGSLEMGLLTFRDVAIEFSPEEWQCLDTAQQNLYRNVMLENYRNLAFLGIALSKPDLITYLEQGKEPWNMKQHEMVD

SEQ ID NO: 293 - protein, 80 aa, Homo sapiens
TPGVRVSTDPEQVTFEDVVVGFSQEEWGQLKPAQRTLYRDVMLDTFRLLVSVGHWLPKPNVISLLEQEAELWAVESRLPQ

SEQ ID NO: 294 - protein, 80 aa, Homo sapiens
EQTQAAGMVAGWLINCYQDAVTFDDVAVDFTQEEWTLLDPSQRDLYRDVMLENYENLASVEWRLKTKGPALRQDRSWFRA

SEQ ID NO: 295 - protein, 80 aa, Homo sapiens
PSEANSIQSANATTKTSETNHTSRPRLKNVDRSTAQQLAVTVGNVTVIITDFKEKTRSSSTSSSTVTSSAGSEQQNQSSS

SEQ ID NO: 296 - protein, 80 aa, Homo sapiens
ALTQGQLSFSDVAIEFSQEEWKCLDPGQKALYRDVMLENYRNLVSLGEDNVRPEACICSGICLPDLSVTSMLEQKRDPWT

SEQ ID NO: 297 - protein, 80 aa, Homo sapiens
AAAAALRAPAQSSVTFEDVAVNFSLEEWSLLNEAQRCLYRDVMLETLTLISSLGCWHGGEDEAAPSKQSTCIHIYKDQGG

SEQ ID NO: 298 - protein, 80 aa, Homo sapiens
AQGSVSFNDVTVDFTQEEWQHLDHAQKTLYMDVMLENYCHLISVGCHMTKPDVILKLERGEEPWTSFAGHTCLEENWKAE

SEQ ID NO: 299 - protein, 80 aa, Homo sapiens
DPVAFKDVAVNFTQEEWALLDISQRKLYREVMLETFRNLTSLGKRWKDQNIEYEHQNPRRNFRSLIEEKVNEIKDDSHCG

SEQ ID NO: 300 - protein, 80 aa, Homo sapiens
SKDLVTFGDVAVNFSQEEWEWLNPAQRNLYRKVMLENYRSLVSLGVSVSKPDVISLLEQGKEPWMVKKEGTRGPCPDWEY

SEQ ID NO: 301 - protein, 80 aa, Homo sapiens
DSVAFEDVAINFTCEEWALLGPSQKSLYRDVMQETIRNLDCIGMIWQNHDIEEDQYKDLRRNLRCHMVERACEIKDNSQC

SEQ ID NO: 302 - protein, 80 aa, Homo sapiens
GPLTFMDVAIEFCLEEWQCLDIAQQNLYRNVMLENYRNLVFLGIAVSKPDLITCLEQEKEPWEPMRRHEMVAKPPVMCSH

SEQ ID NO: 303 - protein, 80 aa, Homo sapiens
QSNDIARGFERGLEPEKIIGATDSCGDLMFLMKWKDTDEADLVLAKEANVKCPQIVIAFYEERLTWHAYPEDAENKEKET

SEQ ID NO: 304 - protein, 80 aa, Homo sapiens
ALPAKDSAWPWEEKPRYLGPVTFEDVAVLFTEAEWKRLSLEQRNLYKEVMLENLRNLVSLAESKPEVHTCPSCPLAFGSQ

SEQ ID NO: 305 - protein, 80 aa, Homo sapiens
DAKSLTAWSRTLVTFKDVFVDFTREEWKLLDTAQQIVYRNVMLENYKNLVSLGYQLTKPDVILRLEKGEEPWLVEREIHQ

SEQ ID NO: 306 - protein, 80 aa, Homo sapiens
DAVAFEDVAVNFTQEEWALLGPSQKNLYRYVMQETIRNLDCIRMIWEEQNTEDQYKNPRRNLRCHMVERFSESKDSSQCG

SEQ ID NO: 307 - protein, 80 aa, Homo sapiens
EKTKVERMVEDYLASGYQDSVTFDDVAVDFTPEEWALLDTTEKYLYRDVMLENYMNLASVEWEIQPRTKRSSLQQGFLKN

SEQ ID NO: 308 - protein, 80 aa, Homo sapiens
DSVAFEDVDVNFTQEEWALLDPSQKNLYRDVMWETMRNLASIGKKWKDQNIKDHYKHRGRNLRSHMLERLYQTKDGSQRG

SEQ ID NO: 309 - protein, 80 aa, Homo sapiens
IESQEPVTFEDVAVDFTQEEWQQLNPAQKTLHRDVMLETYNHLVSVGCSGIKPDVIFKLEHGKDPWIIESELSRWIYPDR

SEQ ID NO: 310 - protein, 80 aa, Homo sapiens
AVGLCKAMSQGLVTFRDVALDFSQEEWEWLKPSQKDLYRDVMLENYRNLVWLGLSISKPNMISLLEQGKEPWMVERKMSQ

SEQ ID NO: 311 - protein, 80 aa, Homo sapiens
DKVEEEAMAPGLPTACSQEPVTFADVAVVFTPEEWVFLDSTQRSLYRDVMLENYRNLASVADQLCKPNALSYLEERGEQW

SEQ ID NO: 312 - protein, 80 aa, Homo sapiens
TFEDVAVYFSQEEWGLLDTAQRALYRHVMLENFTLVTSLGLSTSRPRVVIQLERGEEPWVPSGKDMTLARNTYGRLNSGS

SEQ ID NO: 313 - protein, 80 aa, Homo sapiens
AEPPRLPLTFEDVAIYFSEQEWQDLEAWQKELYKHVMRSNYETLVSLDDGLPKPELISWIEHGGEPFRKWRESQKSGNII

SEQ ID NO: 314 - protein, 80 aa, Homo sapiens
DSVVFEDVAVNFTQEEWALLGPSQKKLYRDVMQETFVNLASIGENWEEKNIEDHKNQGRKLRSHMVERLCERKEGSQFGE

SEQ ID NO: 315 - protein, 80 aa, Homo sapiens
AAAALRDPAQGCVTFEDVTIYFSQEEWVLLDEAQRLLYCDVMLENFALIASLGLISFRSHIVSQLEMGKEPWVPDSVDMT

SEQ ID NO: 316 - protein, 80 aa, Homo sapiens
AAPALALVSFEDVVVTFTGEEWGHLDLAQRTLYQEVMLETCRLLVSLGHPVPKPELIYLLEHGQELWTVKRGLSQSTCAG

SEQ ID NO: 317 - protein, 80 aa, Homo sapiens
IKSQESLTLEDVAVEFTWEEWQLLGPAQKDLYRDVMLENYSNLVSVGYQASKPDALFKLEQGEPWTVENEIHSQICPEIK

SEQ ID NO: 318 - protein, 80 aa, Homo sapiens
GESLESRVTLGSLTAESQELLTFKDVSVDFTQEEWGQLAPAHRNLYREVMLENYGNLVSVGCQLSKPGVISQLEKGEEPW

SEQ ID NO: 319 - protein, 80 aa, Homo sapiens
ASVALEDVAVNFTREEWALLGPCQKNLYKDVMQETIRNLDCVGMKWKDQNIEDQYRYPRKNLRCRMLERFVESKDGTQCG

SEQ ID NO: 320 - protein, 80 aa, Homo sapiens
TESQGTVTFKDVAIDFTQEEWKRLDPAQRKLYRNVMLENYNNLITVGYPFTKPDVIFKLEQEEEPWVMEEEVLRRHWQGE

SEQ ID NO: 321 - protein, 80 aa, Homo sapiens
DSVASEDVAVNFTLEEWALLDPSQKKLYRDVMRETFRNLACVGKKWEDQSIEDWYKNQGRILRNHMEEGLSESKEYDQCG

SEQ ID NO: 322 - protein, 80 aa, Homo sapiens
EETQGELTSSCGSKTMANVSLAFRDVSIDLSQEEWECLDAVQRDLYKDVMLENYSNLVSLGYTIPKPDVITLLEQEKEPW

SEQ ID NO: 323 - protein, 80 aa, Homo sapiens
AAILLTTRPKVPVSFEDVSVYFTKTEWKLLDLRQKVLYKRVMLENYSHLVSLGFSFSKPHLISQLERGEGPWVADIPRTW

SEQ ID NO: 324 - protein, 80 aa, Homo sapiens
KDKVEKEKSEKETTSKKNSHKKTRPRLKNVDRSSAQHLEVTVGDLTVIITDFKEKTKSPPASSAASADQHSQSGSSSDNT

SEQ ID NO: 325 - protein, 80 aa, Homo sapiens
GPLTFTDVAIKFSLEEWQFLDTAQQNLYRDVMLENYRNLVFLGVGVSKPDLITCLEQGKEPWNMKRHKMVAKPPVVCSHF

SEQ ID NO: 326 - protein, 80 aa, Homo sapiens
RKPNPQAMAALFLSAPPQAEVTFEDVAVYLSREEWGRLGPAQRGLYRDVMLETYGNLVSLGVGPAGPKPGVISQLERGDE

SEQ ID NO: 327 - protein, 80 aa, Homo sapiens
LSLSPILLYTCEMFQDPVAFKDVAVNFTQEEWALLDISQKNLYREVMLETFWNLTSIGKKWKDQNIEYEYQNPRRNFRSV

SEQ ID NO: 328 - protein, 80 aa, Homo sapiens
AAGEPRSLLFFQKPVTFEDVAVNFTQEEWDCLDASQRVLYQDVMSETFKNLTSVARIFLHKPELITKLEQEEEQWRETRV

SEQ ID NO: 329 - protein, 80 aa, Homo sapiens
AAMPLKAQYQEMVTFEDVAVHFTKTEWTGLSPAQRALYRSVMLENFGNLTALGYPVPKPALISLLERGDMAWGLEAQDDP

SEQ ID NO: 330 - protein, 80 aa, Homo sapiens
ARVPLTFSDVAIDFSQEEWEYLNSDQRDLYRDVMLENYTNLVSLDFNFTTESNKLSSEKRNYEVNAYHQETWKRNKTFNL

SEQ ID NO: 331 - protein, 80 aa, Homo sapiens
ASRLPTAWSCEPVTFEDVTLGFTPEEWGLLDLKQKSLYREVMLENYRNLVSVEHQLSKPDVVSQLEEAEDFWPVERGIPQ

SEQ ID NO: 332 - protein, 80 aa, Homo sapiens
SKKKRDAADKPRGFARGLDPERIIGATDSSGELMFLMKWKDSDEADLVLAKEANMKCPQIVIAFYEERLTWHSCPEDEAQ

SEQ ID NO: 333 - protein, 80 aa, Homo sapiens
AHKYVGLQYHGSVTFEDVAIAFSQQEWESLDSSQRGLYRDVMLENYRNLVSMGHSRSKPHVIALLEQWKEPEVTVRKDGR

SEQ ID NO: 334 - protein, 80 aa, Homo sapiens
AAARLLPVPAGPQPLSFQAKLTFEDVAVLLSQDEWDRLCPAQRGLYRNVMMETYGNVVSLGLPGSKPDIISQLERGEDPW

SEQ ID NO: 335 - protein, 80 aa, Homo sapiens
AVGLLKAMYQELVTFRDVAVDFSQEEWDCLDSSQRHLYSNVMLENYRILVSLGLCFSKPSVILLLEQGKAPWMVKRELTK

SEQ ID NO: 336 - protein, 80 aa, Homo sapiens
GLLTFRDVAIEFSLEEWQCLDTAQRNLYKNVILENYRNLVFLGIAVSKQDLITCLEQEKEPLTVKRHEMVNEPPVMCSHF

SEQ ID NO: 337 - protein, 80 aa, Homo sapiens
GLLAFRDVALEFSPEEWECLDPAQRSLYRDVMLENYRNLISLGEDSFNMQFLFHSLAMSKPELIICLEARKEPWNVNTEK

SEQ ID NO: 338 - protein, 80 aa, Homo sapiens
NLTEGRVVFEDVAIYFSQEEWGHLDEAQRLLYRDVMLENLALLSSLGSWHGAEDEEAPSQQGFSVGVSEVTASKPCLSSQ

SEQ ID NO: 339 - protein, 80 aa, Homo sapiens
GPAQHTSWPCGSAVPTLKSMVTFEDVAVYFSQEEWELLDAAQRHLYHSVMLENLELVTSLGSWHGVEGEGAHPKQNVSVE

SEQ ID NO: 340 - protein, 80 aa, Homo sapiens
SGYPGAERNLLEYSYFEKGPLTFRDVVIEFSQEEWQCLDTAQQDLYRKVMLENFRNLVFLGIDVSKPDLITCLEQGKDPW

SEQ ID NO: 341 - protein, 80 aa, Homo sapiens
ARKLVMFRDVAIDFSQEEWECLDSAQRDLYRDVMLENYSNLVSLDLPSRCASKDLSPEKNTYETELSQWEMSDRLENCDL

SEQ ID NO: 342 - protein, 80 aa, Homo sapiens
GPLQFRDVAIEFSLEEWHCLDTAQRNLYRNVMLENYSNLVFLGITVSKPDLITCLEQGRKPLTMKRNEMIAKPSVMCSHF

SEQ ID NO: 343 - protein, 80 aa, Homo sapiens
VAGWLTNYSQDSVTFEDVAVDFTQEEWTLLDQTQRNLYRDVMLENYKNLVAVDWESHINTKWSAPQQNFLQGKTSSVVEM

SEQ ID NO: 344 - protein, 80 aa, Homo sapiens
AAAWMAPAQESVTFEDVAVTFTQEEWGQLDVTQRALYVEVMLETCGLLVALGDSTKPETVEPIPSHLALPEEVSLQEQLA

SEQ ID NO: 345 - protein, 80 aa, Homo sapiens
VLEWLFISQEQPKITKSWGPLSFMDVFVDFTWEEWQLLDPAQKCLYRSVMLENYSNLVSLGYQHTKPDIIFKLEQGEELC

SEQ ID NO: 346 - protein, 80 aa, Homo sapiens
AAAVLMDRVQSCVTFEDVFVYFSREEWELLEEAQRFLYRDVMLENFALVATLGFWCEAEHEAPSEQSVSVEGVSQVRTAE

SEQ ID NO: 347 - protein, 80 aa, Homo sapiens
AGSQFPDFKHLGTFLVFEELVTFEDVLVDFSPEELSSLSAAQRNLYREVMLENYRNLVSLGHQFSKPDIISRLEEEESYA

SEQ ID NO: 348 - protein, 80 aa, Homo sapiens
IQSQISFEDVAVDFTLEEWQLLNPTQKNLYRDVMLENYSNLVFLEVWLDNPKMWLRDNQDNLKSMERGHKYDVFGKIFNS

SEQ ID NO: 349 - protein, 80 aa, Homo sapiens
DLVAFEDVAVNFTQEEWSLLDPSQKNLYREVMQETLRNLASIGEKWKDQNIEDQYKNPRNNLRSLLGERVDENTEENHCG

SEQ ID NO: 350 - protein, 80 aa, Homo sapiens
KDEDIKLRVIGQDSSEIHFKVKMTTPLKKLKKSYCQRQGVPVNSLRFLFEGQRIADNHTPEELGMEEEDVIEVYQEQIGG

SEQ ID NO: 351 - protein, 80 aa, Homo sapiens
DSVAFEDVAVNFTQEEWALLSPSQKNLYRDVTLETFRNLASVGIQWKDQDIENLYQNLGIKLRSLVERLCGRKEGNEHRE

SEQ ID NO: 352 - protein, 80 aa, Homo sapiens
RNFWILRLPPGSKGEAPKVPVTFDDVAVYFSELEWGKLEDWQKELYKHVMRGNYETLVSLDYAISKPDILTRIERGEEPC

SEQ ID NO: 353 - protein, 80 aa, Homo sapiens
AAAAPRRPTQQGTVTFEDVAVNFSQEEWCLLSEAQRCLYRDVMLENLALISSLGCWCGSKDEEAPCKQRISVQRESQSRT

SEQ ID NO: 354 - protein, 80 aa, Homo sapiens
SGEDSGSFYSWQKAKREQGLVTFEDVAVDFTQEEWQYLNPPQRTLYRDVMLETYSNLVFVGQQVTKPNLILKLEVEECPA

SEQ ID NO: 355 - protein, 80 aa, Homo sapiens
DSVAFEDVAVNFTQEEWALLGPSQKSLYRNVMQETIRNLDCIEMKWEDQNIGDQCQNAKRNLRSHTCEIKDDSQCGETFG

SEQ ID NO: 356 - protein, 80 aa, Homo sapiens
AAGWLTTWSQNSVTFQEVAVDFSQEEWALLDPAQKNLYKDVMLENFRNLASVGYQLCRHSLISKVDQEQLKTDERGILQG

SEQ ID NO: 357 - protein, 80 aa, Homo sapiens
ENPRNQLMALMLLTAQPQELVMFEEVSVCFTSEEWACLGPIQRALYWDVMLENYGNVTSLEWETMTENEEVTSKPSSSQR

SEQ ID NO: 358 - protein, 80 aa, Homo sapiens
LETYNSLVSLQELVSFEEVAVHFTWEEWQDLDDAQRTLYRDVMLETYSSLVSLGHCITKPEMIFKLEQGAEPWIVEETPN

SEQ ID NO: 359 - protein, 80 aa, Homo sapiens
RHFRRPEPCREPLASPIQDSVAFEDVAVNFTQEEWALLDSSQKNLYREVMQETCRNLASVGSQWKDQNIEDHFEKPGKDI

SEQ ID NO: 360 - protein, 80 aa, Homo sapiens
AAAELTAPAQGIVTFEDVAVYFSWKEWGLLDEAQKCLYHDVMLENLTLTTSLGGSGAGDEEAPYQQSTSPQRVSQVRIPK

SEQ ID NO: 361 - protein, 80 aa, Homo sapiens
AATFQLPGHQEMPLTFQDVAVYFSQAEGRQLGPQQRALYRDVMLENYGNVASLGFPVPKPELISQLEQGKELWVLNLLGA

SEQ ID NO: 362 - protein, 80 aa, Homo sapiens
RSEAGEPPSSLQVKPETPASAAVAVAAAAAPTTTAEKPPAEAQDEPAESLSEFKPFFGNIIITDVTANCLTVTFKEYVTV

SEQ ID NO: 363 - protein, 80 aa, Homo sapiens
HRTTRIKITELNPHLMCALCGGYFIDATTIVECLHSFCKTCIVRYLETNKYCPMCDVQVHKTRPLLSIRSDKTLQDIVYK

SEQ ID NO: 364 - protein, 80 aa, Homo sapiens
ASQEFEVEAIVDKRQDKNGNTQYLVRWKGYDKQDDTWEPEQHLMNCEKCVHDFNRRQTEKQKKLTWTTTSRIFSNNARRR

SEQ ID NO: 365 - protein, 80 aa, Homo sapiens
ASGDLYEVERIVDKRKNKKGKWEYLIRWKGYGSTEDTWEPEHHLLHCEEFIDEFNGLHMSKDKRIKSGKQSSTSKLLRDS

SEQ ID NO: 366 - protein, 80 aa, Homo sapiens
TLIRKADLENHNKDGGFWTVIDGKVYDIKDFQTQSLTGNSILAQFAGEDPVVALEAALQFEDTRESMHAFCVGQYLEPDQ

SEQ ID NO: 367 - protein, 80 aa, Homo sapiens
EKTKIGTMVEDHRSNSYQDSVTFDDVAVEFTPEEWALLDTTQKYLYRDVMLENYMNLASVDFFFCLTSEWEIQPRTKRSS

SEQ ID NO: 368 - protein, 80 aa, Homo sapiens
AHELVMFRDVAIDVSQEEWECLNPAQRNLYKEVMLENYSNLVSLGLSVSKPAVISSLEQGKEPWMVVREETGRWCPGTWK

SEQ ID NO: 369 - protein, 80 aa, Homo sapiens
AFEDVAVYFSQEEWGLLDTAQRALYRRVMLDNFALVASLGLSTSRPRVVIQLERGEEPWVPSGTDTTLSRTTYRRRNPGS

SEQ ID NO: 370 - protein, 80 aa, Homo sapiens
AQLRRGHLTFRDVAIEFSQEEWKCLDPVQKALYRDVMLENYRNLVSLGICLPDLSIISMMKQRTEPWTVENEMKVAKNPD

SEQ ID NO: 371 - protein, 80 aa, Homo sapiens
SDHSLGISRSKTPVDDPMSLLYNMNDCYSKLKELVPSIPQNKKVSKMEILQHVIDYILDLQIALDSHPTIVSLHHQRPGQ

SEQ ID NO: 372 - protein, 80 aa, Homo sapiens
KDPNEPQKPVSAYALFFRDTQAAIKGQNPNATFGEVSKIVASMWDGLGEEQKQVYKKKTEAAKKEYLKQLAAYRASLVSK

SEQ ID NO: 373 - protein, 80 aa, Homo sapiens
QEEKQEDAAICPVTVLPEEPVTFQDVAVDFSREEWGLLGPTQRTEYRDVMLETFGHLVSVGWETTLENKELAPNSDIPEE

SEQ ID NO: 374 - protein, 80 aa, Homo sapiens
DASRLSGRDPSSWTVEDVMQFVREADPQLGPHADLFRKHEIDGKALLLLRSDMMMKYMGLKLGPALKLSYHIDRLKQGKF

SEQ ID NO: 375 - protein, 80 aa, Homo sapiens
AVTFEDVTIIFTWEEWKFLDSSQKRLYREVMWENYTNVMSVENWNESYKSQEEKFRYLEYENFSYWQGWWNAGAQMYENQ

SEQ ID NO: 376 - protein, 80 aa, Homo sapiens
ELSAIGEQVFAVESIRKKRVRKGKVEYLVKWKGWPPKYSTWEPEEHILDPRLVMAYEEKEERDRASGYRKRGPKPKRLLL

SEQ ID NO: 377 - protein, 80 aa, Homo sapiens
GGAGARLPALLDEQQVNVLLYDMNGCYSRLKELVPTLPQNRKVSKVEILQHVIDYIRDLQLELNSESEVGTPGGRGLPVR

SEQ ID NO: 378 - protein, 80 aa, Homo sapiens
VVMAASPGSLHSPQQLAEEATRKRELRLMKNREAAKECRRRKKEYVKCLESRVAVLEVQNKKLIEELETLKDICSPKTDY

SEQ ID NO: 379 - protein, 80 aa, Homo sapiens
GGGPGGRPGREPRQRHTANARERDRTNSVNTAFTALRTLIPTEPADRKLSKIETLRLASSYISHLGNVLLAGEACGDGQP

SEQ ID NO: 380 - protein, 80 aa, Homo sapiens
SGFGYSLPQQQPAAVARRNERERNRVKLVNLGFATLREHVPNGAANKKMSKVETLRSAVEYIRALQQLLDEHDAVSAAFQ

SEQ ID NO: 381 - protein, 80 aa, Homo sapiens
APLPPRDPNGAGPEWREPGAVSFADVAVYFCREEWGCLRPAQRALYRDVMRETYGHLSALGIGGNKPALISWVEEEAELW

SEQ ID NO: 382 - protein, 80 aa, Homo sapiens
KQGFSKDPSTWSVDEVIQFMKHTDPQISGPLADLFRQHEIDGKALFLLKSDVMMKYMGLKLGPALKLCYYIEKLKEGKYS

SEQ ID NO: 383 - protein, 80 aa, Homo sapiens
SGGGSPQSYEELQTQRVMANVRERQRTQSLNEAFAALRKIIPTLPSDKLSKIQTLKLAARYIDFLYQVLQSDELDSKMAS

SEQ ID NO: 384 - protein, 80 aa, Homo sapiens
IAPGVVMASSPALPTQPAEEAARKREVRLMKNREAARECRRKKKEYVKCLENRVAVLENQNKTLIEELKALKDLYCHKSD

SEQ ID NO: 385 - protein, 80 aa, Homo sapiens
SRIPVSKSQPVTPEKHRARKRQAWLWEEDKNLRSGVRKYGEGNWSKILLHYKFNNRTSVMLKDRWRTMKKLKLISSDSED

SEQ ID NO: 386 - protein, 80 aa, Homo sapiens
SLAIARGRGKGPAAEEPLSLLDDMNHCYSRLRELVPGVPRGTQLSQVEILQRVIDYILDLQVVLAEPAPGPPDGPHLPIQ

SEQ ID NO: 387 - protein, 80 aa, Homo sapiens
GSGPPSSGGGLYRDMGAQGGRPSLIARIPVARILGDPEEESWSPSLTNLEKVVVTDVTSNFLTVTIKESNTDQGFFKEKR

SEQ ID NO: 388 - protein, 80 aa, Homo sapiens
ELPAVGEHVFAVESIEKKRIRKGRVEYLVKWRGWSPKYNTWEPEENILDPRLLIAFQNRERQEQLMGYRKRGPKPKPLVV

SEQ ID NO: 389 - protein, 80 aa, Homo sapiens
VDSSSNQLPSSKRMRTAFTSTQLLELEREFASNMYLSRLRRIEIATYLNLSEKQVKIWFQNRRVKHKKEGKGSNHRGGGG

SEQ ID NO: 390 - protein, 80 aa, Homo sapiens
TPGGGGDAGKKRKRRVLFSKAQTYELERRFRQQRYLSAPEREHLASLIRLTPTQVKIWFQNHRYKMKRARAEKGMEVTPL

SEQ ID NO: 391 - protein, 80 aa, Homo sapiens
QTVVMTSPVTLTSQTTKTDDPQLKREIRLMKNREAARECRRKKKEYVKCLENRVAVLENQNKTLIEELKTLKDLYSNKSV

SEQ ID NO: 392 - protein, 80 aa, Homo sapiens
KGSPSAQSFEELQSQRILANVRERQRTQSLNEAFAALRKIIPTLPSDKLSKIQTLKLAARYIDFLYQVLQSDEMDNKMTS

SEQ ID NO: 393 - protein, 80 aa, Homo sapiens
NLTEDYMVFEDVAIHFSQEEWGILNDVQRHLHSDVMLENFALLSSVGCWHGAKDEEAPSKQCVSVGVSQVTTLKPALSTQ

SEQ ID NO: 394 - protein, 80 aa, Homo sapiens
KDPNEPQKPVSAYALFFRDTQAAIKGQNPNATFGEVSKIVASMWDSLGEEQKQVYKRKTEAAKKEYLKALAAYRASLVSK

SEQ ID NO: 395 - protein, 80 aa, Homo sapiens
KDPNEPQKPVSAYALFFRDTQAAIKGQNPNATFGEVSKIVASMWDSLGEEQKQVYKRKTEAAKKEYLKALAAYKDNQECQ

SEQ ID NO: 396 - protein, 80 aa, Homo sapiens
LDGSTWDFCSEDCKSKYLLWYCKAARCHACKRQGKLLETIHWRGQIRHFCNQQCLLRFYSQQNQPNLDTQSGPESLLNSQ

SEQ ID NO: 397 - protein, 80 aa, Homo sapiens
ASVQASRRQWCYLCDLPKMPWAMVWDFSEAVCRGCVNFEGADRIELLIDAARQLKRSHVLPEGRSPGPPALKHPATKDLA

SEQ ID NO: 398 - protein, 80 aa, Homo sapiens
MEGPQPENMQPRTRRTKFTLLQVEELESVFRHTQYPDVPTRRELAENLGVTEDKVRVWFKNKRARCRRHQRELMLANELR

SEQ ID NO: 399 - protein, 80 aa, Homo sapiens
PKIMPKKPAEEGNDSEEVPEASGPQNDGKELCPPGKPTTSEKIHERSGPKRGEHAWTHRLRERKQLVIYEEISDPEEDDE

SEQ ID NO: 400 - protein, 80 aa, Homo sapiens
SAAQVSSSRRQSCYLCDLPRMPWAMIWDFSEPVCRGCVNYEGADRIEFVIETARQLKRAHGCFQDGRSPGPPPPVGVKTV

SEQ ID NO: 401 - protein, 80 aa, Homo sapiens
PGPPGSLEMGPLTFRDVAIEFSLEEWQCLDTAQRNLYRKVMFENYRNLVFLGIAVSKPHLITCLEQGKEPWNRKRQEMVA

SEQ ID NO: 402 - protein, 80 aa, Homo sapiens
NKKKVEEVLEEEEEEYVVEKVLDRRVVKGKVEYLLKWKGFSDEDNTWEPEENLDCPDLIAEFLQSQKTAHETDKSEGGKR

SEQ ID NO: 403 - protein, 80 aa, Homo sapiens
LANVVEKVRLLRLHPGMGLKGDLCERHGEKLKMFCKEDVLIMCEACSQSPEHEAHSVVPMEDVAWEYKWELHEALEHLKK

SEQ ID NO: 404 - protein, 80 aa, Homo sapiens [sequence omitted]

SEQ ID NO: 405 - protein, 80 aa, Homo sapiens
ENSDLLPVAQTEPSIWTVDDVWAFIHSLPGCQDIADEFRAQEIDGQALLLLKEDHLMSAMNIKLGPALKICARINSLKES

SEQ ID NO: 406 - protein, 80 aa, Homo sapiens
AGPGGGSRSGSGRPAAANAARERSRVQTLRHAFLELQRTLPSVPPDTKLSKLDVLLLATTYIAHLTRSLQDDAEAPADAG

SEQ ID NO: 407 - protein, 80 aa, Homo sapiens
QNGKSKKVEEAEPEEFVVEKVLDRRVVNGKVEYFLKWKGFTDADNTWEPEENLDCPELIEAFLNSQKAGKEKDGTKRKSL

SEQ ID NO: 408 - protein, 80 aa, Homo sapiens
QHPPDACAFRRGRKKRIPYSKGQLRELEREYAANKFITKDKRRKISAATSLSERQITIWFQNRRVKEKKVLAKVKNSATP

SEQ ID NO: 409 - protein, 80 aa, Homo sapiens
SMSPTTSSQILARKRRRGIIEKRRRDRINNSLSELRRLVPSAFEKQGSAKLEKAEILQMTVDHLKMLHTAGGKGYFDAHA

SEQ ID NO: 410 - protein, 80 aa, Homo sapiens
LVGMGHHFLPSEPTKWNVEDVYEFIRSLPGCQEIAEEFRAQEIDGQALLLLKEDHLMSAMNIKLGPALKIYARISMLKDS

SEQ ID NO: 411 - protein, 80 aa, Homo sapiens
PANEDAPQPGEHGSACEVSVSFEDVTVDFSREEWQQLDSTQRRLYQDVMLENYSHLLSVGFEVPKPEVIFKLEQGEGPWT

SEQ ID NO: 412 - protein, 80 aa, Homo sapiens
GYSSTENLQLVLERRRVANAKERERIKNLNRGFARLKALVPFLPQSRKPSKVDILKGATEYIQVLSDLLEGAKDSKKQDP

SEQ ID NO: 413 - protein, 80 aa, Homo sapiens
EEAPAPEDVTKWTVDDVCSFVGGLSGCGEYTRVFREQGIDGETLPLLTEEHLLTNMGLKLGPALKIRAQVARRLGRVFYV

SEQ ID NO: 414 - protein, 80 aa, Homo sapiens
GGTLAHTPRRSLPSHHGKKMRMARCGHCRGCLRVQDCGSCVNCLDKPKFGGPNTKKQCCVYRKCDKIEARKMERLAKKGR

SEQ ID NO: 415 - protein, 80 aa, Homo sapiens
LNSPTTTSQIMARKKRRGIIEKRRRDRINNSLSELRRLVPTAFEKQGSAKLEKAEILQMTVDHLKMLQATGGKGYFDAHA

SEQ ID NO: 416 - protein, 80 aa, Homo sapiens
QPVKSELDEEEERRKRRREKNKVAAARCRNKKKERTEFLQRESERLELMNAELKTQIEELKQERQQLILMLNRHRPTCIV

SEQ ID NO: 417 - protein, 80 aa, Homo sapiens
LQPEVSSYRRGRKKRVPYTKVQLKELEKEYAASKFITKEKRRRISATTNLSERQVTIWFQNRRVKEKKVVSKSKAPHLHS

SEQ ID NO: 418 - protein, 80 aa, Homo sapiens
LPVPLDSAFEPAFLRKRNERERQRVRCVNEGYARLRDHLPRELADKRLSKVETLRAAIDYIKHLQELLERQAWGLEGAAG

SEQ ID NO: 419 - protein, 80 aa, Homo sapiens
SPFLQRPLHKRKGGQVRFSNDQTIELEKKFETQKYLSPPERKRLAKMLQLSERQVKTWFQNRRAKWRRLKQENPQSNKKE

SEQ ID NO: 420 - protein, 80 aa, Homo sapiens
IAIATGSLHCVCCTEDGEVYTWGDNDEGQLGDGTTNAIQRPRLVAALQGKKVNRVACGSAHTLAWSTSKPASAGKLPAQV

SEQ ID NO: 421 - protein, 80 aa, Homo sapiens
GGSDASQVPNGKRMRTAFTSTQLLELEREFSSNMYLSRLRRIEIATYLNLSEKQVKIWFQNRRVKHKKEGKGTQRNSHAG

SEQ ID NO: 422 - protein, 80 aa, Homo sapiens
RLDLPPGFMFKVQAQHDYTATDTDELQLKAGDVVLVIPFQNPEEQDEGWLMGVKESDWNQHKELEKCRGVFPENFTERVP

SEQ ID NO: 423 - protein, 80 aa, Homo sapiens
GICKLPGRLRIQPALWSREDVLHWLRWAEQEYSLPCTAEHGFEMNGRALCILTKDDFRHRAPSSGDVLYELLQYIKTQRR

SEQ ID NO: 424 - protein, 80 aa, Homo sapiens
PNYRGCEYSYGPAFTRKRNERERQRVKCVNEGYAQLRHHLPEEYLEKRLSKVETLRAAIKYINYLQSLLYPDKAETKNNP

SEQ ID NO: 425 - protein, 80 aa, Homo sapiens
LHGINPVFLSSNPSRWSVEEVYEFIASLQGCQEIAEEFRSQEIDGQALLLLKEEHLMSAMNIKLGPALKICAKINVLKET

SEQ ID NO: 426 - protein, 80 aa, Homo sapiens
QAGQQQGQQKQKRHRTRFTPAQLNELERSFAKTHYPDIFMREELALRIGLTESRVQVWFQNRRAKWKKRKKTTNVFRAPG

SEQ ID NO: 427 - protein, 80 aa, Homo sapiens
AAAVAVAAASRRQSCYLCDLPRMPWAMIWDFTEPVCRGCVNYEGADRVEFVIETARQLKRAHGCFPEGRSPPGAAASAAA

SEQ ID NO: 428 - protein, 80 aa, Homo sapiens
FSSQTPASIKEEEGSPEKERPPEAEYINSRCVLFTYFQGDISSVVDEHFSRALSQPSSYSPSCTSSKAPRSSGPWRDCSF

SEQ ID NO: 429 - protein, 80 aa, Homo sapiens
DKAGGSSGQRTRKKRCPYTKYQIRELEREFFFSVYINKEKRLQLSRMLNLTDRQVKIWFQNRRMKEKKINRDRLQYYSAN

SEQ ID NO: 430 - protein, 80 aa, Homo sapiens
GAPLSGLQGLPECTRCGHGIVGTIVKARDKLYHPECFMCSDCGLNLKQRGYFFLDERLYCESHAKARVKPPEGYDVVAVY

SEQ ID NO: 431 - protein, 80 aa, Homo sapiens
RRPATAETGGGAAAVARRNERERNRVKLVNLGFQALRQHVPHGGASKKLSKVETLRSAVEYIRALQRLLAEHDAVRNALA

SEQ ID NO: 432 - protein, 80 aa, Homo sapiens
TVQVTGKTRTKEKYRVVYTDHQRLELEKEFHCNRYITIQRKSELAVNLGLSERQVKIWFQNRRAKERKMIKKKISQFENS

SEQ ID NO: 433 - protein, 80 aa, Homo sapiens
EEAAQKRKEKEPGMALPQGHLTFRDVAIEFSLEEWKCLDPTQRALYRAMMLENYRNLHSVDISSKCMMKKFSSTAQGNTE

SEQ ID NO: 434 - protein, 80 aa, Homo sapiens
DIRASQVARWTVDEVAEFVQSLLGCEEHAKCFKKEQIDGKAFLLLTQTDIVKVMKIKLGPALKIYNSILMFRHSQELPEE

SEQ ID NO: 435 - protein, 80 aa, Homo sapiens
LSPLEGTKMTVNNLHPRVTEEDIVELFCVCGALKRARLVHPGVAEVVFVKKDDAITAYKKYNNRCLDGQPMKCNLHMNGN

SEQ ID NO: 436 - protein, 80 aa, Homo sapiens
DNAERPRARRRRKPRVLFSQAQVYELERRFKQQRYLSAPERDQLASVLKLTSTQVKIWFQNRRYKCKRQRQDQTLELVGL

SEQ ID NO: 437 - protein, 80 aa, Homo sapiens
SQVKSKAKKTVDKHSDEYKIRRERNNIAVRKSRDKAKMRNLETQHKVLELTAENERLQKKVEQLSRELSTLRNLFKQLPE

SEQ ID NO: 438 - protein, 80 aa, Homo sapiens
KRDYIRLYGIKCAKCSIGFSKNDFVMRARSKVYHIECFRCVACSRQLIPGDEFALREDGLFCRADHDVVERASLGAGDPL

SEQ ID NO: 439 - protein, 80 aa, Homo sapiens
SLGSQVKTRTKDKYRVVYTDHQRLELEKEFHYSRYITIRRKAELAATLGLSERQVKIWFQNRRAKERKINKKKLQQQQQQ

SEQ ID NO: 440 - protein, 80 aa, Homo sapiens
QGGQRGRPHSRRRHRTTFSPVQLEQLESAFGRNQYPDIWARESLARDTGLSEARIQVWFQNRRAKQRKQERSLLQPLAHL

SEQ ID NO: 441 - protein, 80 aa, Homo sapiens
DALTYLDQVKIRFGSDPATYNGFLEIMKEFKSQSIDTPGVIRRVSQLFHEHPDLIVGFNAFLPLGYRIDIPKNGKLNIQS

SEQ ID NO: 442 - protein, 80 aa, Homo sapiens
RLHLDSNPLKWSVADVVRFIRSTDCAPLARIFLDQEIDGQALLLLTLPTVQECMDLKLGPAIKLCHHIERIKFAFYEQFA

SEQ ID NO: 443 - protein, 80 aa, Homo sapiens
AKGAAPNAPRTRKKRCPYSKFQIRELEREFFFNVYINKEKRLQLSRMLNLTDRQVKIWFQNRRMKEKKLSRDRLQYFSGN

SEQ ID NO: 444 - protein, 80 aa, Homo sapiens
TTGNWLTAKSGRKKRCPYTKHQTLELEKEFLFNMYLTRERRLEISKTINLTDRQVKIWFQNRRMKLKKMNRENRIRELTS

SEQ ID NO: 445 - protein, 80 aa, Homo sapiens
YLVSNVIELLDVDPNDQEEDGANIDLDSQRKGKCAVIKTSTRQTYFLPVIGLVDAEKLKPGDLVGVNKDSYLILETLPTE

SEQ ID NO: 446 - protein, 80 aa, Homo sapiens
KASPTLGKRKKRRHRTVFTAHQLEELEKAFSEAHYPDVYAREMLAVKTELPEDRIQVWFQNRRAKWRKREKRWGGSSVMA

SEQ ID NO: 447 - protein, 80 aa, Homo sapiens
EESERPKPRSRRKPRVLFSQAQVFELERRFKQQRYLSAPEREHLASSLKLTSTQVKIWFQNRRYKCKRQRQDKSLELGAH

SEQ ID NO: 448 - protein, 80 aa, Homo sapiens
VVPGSRQEEVIDHKLTEREWAEEWKHLNNLLNCIMDMVEKTRRSLTVLRRCQEADREELNHWARRYSDAEDTKKGPAPAA

SEQ ID NO: 449 - protein, 80 aa, Homo sapiens
ESPEKKPACRKKKTRTVFSRSQVFQLESTFDMKRYLSSSERAGLAASLHLTETQVKIWFQNRRNKWKRQLAAELEAANLS

SEQ ID NO: 450 - protein, 80 aa, Homo sapiens
RGGVGVGGGRKKKTRTVFSRSQVFQLESTFDLKRYLSSAERAGLAASLQLTETQVKIWFQNRRNKWKRQLAAELEAASLS

SEQ ID NO: 451 - protein, 80 aa, Homo sapiens
ELLAHGRQKILDLLNEGSARDLRSLQRIGPKKAQLIVGWRELHGPFSQVEDLERVEGITGKQMESFLKANILGLAAGQRC

SEQ ID NO: 452 - protein, 80 aa, Homo sapiens
ESPYGETISPEDAPESISKAVASLPPEQMFELMKQMKLCVQNSPQEARNMLLQNPQLAYALLQAQVVMRIVDPEIALKIL

SEQ ID NO: 453 - protein, 80 aa, Homo sapiens
AGPLHKGKKAVNKDSLEYRLRRERNNIAVRKSRDKAKRRILETQQKVLEYMAENERLRSRVEQLTQELDTLRNLFRQIPE

SEQ ID NO: 454 - protein, 80 aa, Homo sapiens
IRIVNGKPKKVRKPRTIYSSFQLAALQRRFQKTQYLALPERAELAASLGLTQTQVKIWFQNRRSKFKKMWKSGEIPSEQH

SEQ ID NO: 455 - protein, 80 aa, Homo sapiens
TVYQFCSPSCWTKFQRTSPEGGIHLSCHYCHSLFSGKPEVLDWQDQVFQFCCRDCCEDFKRLRGVVSQCEHCRQEKLLHE

SEQ ID NO: 456 - protein, 80 aa, Homo sapiens
TMVDTEMPFWPTNFGISSVDLSVMEDHSHSFDIKPFTTVDFSSISTPHYEDIPFTRTDPVVADYKYDLKLQEYQSAIKVE

SEQ ID NO: 457 - protein, 80 aa, Homo sapiens
GRHHAELLKPRCSACDEIIFADECTEAEGRHWHMKHFCCLECETVLGGQRYIMKDGRPFCCGCFESLYAEYCETCGEHIG

SEQ ID NO: 458 - protein, 80 aa, Homo sapiens
DPDKESPGCKRRRTRTNFTGWQLEELEKAFNESHYPDVFMREALALRLDLVESRVQVWFQNRRAKWRKKENTKKGPGRPA

SEQ ID NO: 459 - protein, 80 aa, Homo sapiens
TEQPTPRQKKPRRSRTIFTELQLMGLEKKFQKQKYLSTPDRLDLAQSLGLTQLQVKTWYQNRRMKWKKMVLKGGQEAPTK

SEQ ID NO: 460 - protein, 80 aa, Homo sapiens
SMELAKNKSKKRRNRTTFSTFQLEELEKVFQKTHYPDVYAREQLALRTDLTEARVQVWFQNRRAKWRKRERYGKIQEGRN

SEQ ID NO: 461 - protein, 80 aa, Homo sapiens
GGGGGAGPVVVVRQRQAANARERDRTQSVNTAFTALRTLIPTEPVDRKLSKIETVRLASSYIAHLANVLLLGDSADDGQP

SEQ ID NO: 462 - protein, 80 aa, Homo sapiens
IDDTVEGITGNLFEVYLKPYFLEAYRPIRKGDIFLVRGGMRAVEFKVVETDPSPYCIVAPDTVIHCEGEPIKREDEEESL

SEQ ID NO: 463 - protein, 80 aa, Homo sapiens
SALNQTKKRKKRRHRTIFTSYQLEELEKAFNEAHYPDVYAREMLAMKTELPEDRIQVWFQNRRAKWRKREKCWGRSSVMA

SEQ ID NO: 464 - protein, 80 aa, Homo sapiens
DGLPWGAAPGRARKKRKPYTKQQIAELENEFLVNEFINRQKRKELSNRLNLSDQQVKIWFQNRRMKKKRVVLREQALALY

SEQ ID NO: 465 - protein, 80 aa, Homo sapiens
GGGGSGKTRTKDKYRVVYTDHQRLELEKEFHYSRYITIRRKSELAANLGLTERQVKIWFQNRRAKERKVNKKKQQQQQPP

SEQ ID NO: 466 - protein, 80 aa, Homo sapiens
TRAGGLALGRSEASPENAARERSRVRTLRQAFLALQAALPAVPPDTKLSKLDVLVLAASYIAHLTRTLGHELPGPAWPPF

SEQ ID NO: 467 - protein, 80 aa, Homo sapiens
KCDSNVSSSKKRRHRTTFTSLQLEELEKVFQKTHYPDVYVREQLALRTELTEARVQVWFQNRRAKWRKRERYGQIQQAKS

SEQ ID NO: 468 - protein, 80 aa, Homo sapiens
NAANWLTAKSGRKKRCPYTKHQTLELEKEFLFNMYLTRERRLEISRSVHLTDRQVKIWFQNRRMKLKKMNRENRIRELTA

SEQ ID NO: 469 - protein, 80 aa, Homo sapiens
LSEEEQPKKKHRRNRTTFTTYQLHELERAFEKSHYPDVYSREELAGKVNLPEVRVQVWFQNRRAKWRRQEKLEVSSMKLQ

SEQ ID NO: 470 - protein, 80 aa, Homo sapiens
HMAGLAEYPMQGELASAISSGKKKRKRCGMCAPCRRRINCEQCSSCRNRKTGHQICKFRKCEELKKKPSAALEKVMLPTG

SEQ ID NO: 471 - protein, 80 aa, Homo sapiens
SITKHPSTWSVEAVVLFLKQTDPLALCPLVDLFRSHEIDGKALLLLTSDVLLKHLGVKLGTAVKLCYYIDRLKQGKCFEN

SEQ ID NO: 472 - protein, 80 aa, Homo sapiens
ACRRKREFIPDEKKDAMYWEKRRKNNEAAKRSREKRRLNDLVLENKLIALGEENATLKAELLSLKLKFGLISSTAYAQEI

SEQ ID NO: 473 - protein, 80 aa, Homo sapiens
EIRFNGKGKKIRKPRTIYSSLQLQALNHRFQQTQYLALPERAELAASLGLTQTQVKIWFQNKRSKFKKLLKQGSNPHESD

SEQ ID NO: 474 - protein, 80 aa, Homo sapiens
GLHGTRQEEMIDHRLTDREWAEEWKHLDHLLNCIMDMVEKTRRSLTVLRRCQEADREELNYWIRRYSDAEDLKKGGGSSS

SEQ ID NO: 475 - protein, 80 aa, Homo sapiens
ELSAVGERVFAAEALLKRRIRKGRMEYLVKWKGWSQKYSTWEPEENILDARLLAAFEEREREMELYGPKKRGPKPKTFLL

SEQ ID NO: 476 - protein, 80 aa, Homo sapiens
AREKSAGKRGPDRGSPEYRQRRERNNIAVRKSRDKAKRRNQEMQQKLVELSAENEKLHQRVEQLTRDLAGLRQFFKQLPS

SEQ ID NO: 477 - protein, 80 aa, Homo sapiens
SGGCDNLIKLWKEEEDGQWKEEQKLEAHSDWVRDVAWAPSIGLPTSTIASCSQDGRVFIWTCDDASSNTWSPKLLHKFND

SEQ ID NO: 478 - protein, 80 aa, Homo sapiens
VKGVDLDAPGSINGVPLLEVDLDSFEDKPWRKPGADLSDYFNYGFNEDTWKAYCEKQKRIRMGLEVIPVTSTTNKITAED

SEQ ID NO: 479 - protein, 80 aa, Homo sapiens
KADSESNKGKKRRNRTTFTSYQLEELEKVFQKTHYPDVYAREQLAMRTDLTEARVQVWFQNRRAKWRKRERFGQMQQVRT

SEQ ID NO: 480 - protein, 80 aa, Homo sapiens
TAKQREAEATAKRPRTTITAKQLETLKSAYNTSPKPARHVREQLSSETGLDMRVVQVWFQNRRAKEKRLKKDAGRQRWGQ

SEQ ID NO: 481 - protein, 80 aa, Homo sapiens
GRHHAECLKPRCAACDEIIFADECTEAEGRHWHMKHFCCFECETVLGGQRYIMKEGRPYCCHCFESLYAEYCDTCAQHIG

SEQ ID NO: 482 - protein, 80 aa, Homo sapiens
IIGGDRPDEFLQVKNVLKDGPAAQDGKIAPGDVIVDINGNCVLGHTHADVVQMFQLVPVNQYVNLTLCRGYPLPDDSEDP

SEQ ID NO: 483 - protein, 80 aa, Homo sapiens
CCPECDTRVTSQCLDQNGHKLYRSGDNWTHSCQQCRCLEGEVDCWPLTCPNLSCEYTAILEGECCPRCVSDPCLADNITY

SEQ ID NO: 484 - protein, 80 aa, Homo sapiens
LNSEEKKKRKQRRNRTTFNSSQLQALERVFERTHYPDAFVREDLARRVNLTEARVQVWFQNRRAKFRRNERAMLANKNAS

SEQ ID NO: 485 - protein, 80 aa, Homo sapiens
GLNGGYQDELVDHRLTEREWADEWKHLDHALNCIMEMVEKTRRSMAVLRRCQESDREELNYWKRRYNENTELRKTGTELV

SEQ ID NO: 486 - protein, 80 aa, Homo sapiens
GPGEEAPKKKHRRNRTTFTTYQLHQLERAFEASHYPDVYSREELAAKVHLPEVRVQVWFQNRRAKWRRQERLESGSGAVA

SEQ ID NO: 487 - protein, 80 aa, Homo sapiens
VRMVNGKPKKVRKPRTIYSSYQLAALQRRFQKAQYLALPERAELAAQLGLTQTQVKIWFQNRRSKFKKLYKNGEVPLEHS

SEQ ID NO: 488 - protein, 80 aa, Homo sapiens
EVRFNGKGKKIRKPRTIYSSLQLQALNRRFQQTQYLALPERAELAASLGLTQTQVKIWFQNKRSKFKKLMKQGGAALEGS

SEQ ID NO: 489 - protein, 80 aa, Homo sapiens
GRSEQPKARQRRKPRVLFSQAQVLALERRFKQQRYLSAPEREHLASALQLTSTQVKIWFQNRRYKCKRQRQDKSLELAGH

SEQ ID NO: 490 - protein, 80 aa, Homo sapiens
LPRTLGELQLYRILQKANLLSYFDAFIQQGGDDVQQLCEAGEEEFLEIMALVGMASKPLHVRRLQKALRDWVTNPGLFNQ

SEQ ID NO: 491 - protein, 80 aa, Homo sapiens
NLSLDEDIQKWTVDDVHSFIRSLPGCSDYAQVFKDHAIDGETLPLLTEEHLRGTMGLKLGPALKIQSQVSQHVGSMFYKK

SEQ ID NO: 492 - protein, 80 aa, Homo sapiens
SPEDGSLKKKQRRQRTHFTSQQLQELEATFQRNRYPDMSTREEIAVWTNLTEARVRVWFKNRRAKWRKRERSQQAELCKG

SEQ ID NO: 493 - protein, 80 aa, Homo sapiens
SNLLVSASDDKTLKIWDVSSGKCLKTLKGHSNYVFCCNFNPQSNLIVSGSFDESVRIWDVKTGKCLKTLPAHSDPVSAVH

SEQ ID NO: 494 - protein, 80 aa, Homo sapiens
GNYKSEVNSKPRKERTAFTKEQIRELEAEFAHHNYLTRLRRYEIAVNLDLTERQVKVWFQNRRMKWKRVKGGQQGAAARE

SEQ ID NO: 495 - protein, 80 aa, Homo sapiens
LPRTLGELQLYRVLQRANLLSYYETFIQQGGDDVQQLCEAGEEEFLEIMALVGMATKPLHVRRLQKALREWATNPGLFSQ

SEQ ID NO: 496 - protein, 80 aa, Homo sapiens
PEEPTIGDIYNGKVTSIMQFGCFVQLEGLRKRWEGLVHISELRREGRVANVADVVSKGQRVKVKVLSFTGTKTSLSMKDV

SEQ ID NO: 497 - protein, 80 aa, Homo sapiens
YAFNHPFSINNLMSSEQQHHHSHHHHQPHKMDLKAYEQVMHYPGYGSPMPGSLAMGPVTNKTGLDASPLAADTSYYQGVY

SEQ ID NO: 498 - protein, 80 aa, Homo sapiens
TAAAGPAPPTAPEPAGASSEPEAGDWRPEMSPCSNVVVTDVTSNLLTVTIKEFCNPEDFEKVAAGVAGAAGGGGSIGASK

SEQ ID NO: 499 - protein, 80 aa, Homo sapiens
FLLHNALARKPKRIRTAFSPSQLLRLEHAFEKNHYVVGAERKQLAHSLSLTETQVKVWFQNRRTKFKRQKLEEEGSDSQQ

SEQ ID NO: 500 - protein, 80 aa, Homo sapiens
KRIALYIGNLTWWTTDEDLTEAVHSLGVNDILEIKFFENRANGQSKGFALVGVGSEASSKKLMDLLPKRELHGQNPVVTP

SEQ ID NO: 501 - protein, 80 aa, Homo sapiens
SGAPWYPINSRSRKKRKPYSKLQLAELEGEFLVNEFITRQRRRELSDRLNLSDQQVKIWFQNRRMKKKRLLLREQALSFF

SEQ ID NO: 502 - protein, 80 aa, Homo sapiens
SDNLYPESITSRDCVQLGPPSEGELVELRWTDGNLYKAKFISSVTSHIYQVEFEDGSQLTVKRGDIFTLEEELPKRVRSR

SEQ ID NO: 503 - protein, 80 aa, Homo sapiens
GIPASKVSKWSTDEVSEFIQSLPGCEEHGKVFKDEQIDGEAFLLMTQTDIVKIMSIKLGPALKIFNSILMFKAAEKNSHN

SEQ ID NO: 504 - protein, 80 aa, Homo sapiens
EPSGLHEKRKQRRIRTTFTSAQLKELERVFAETHYPDIYTREELALKIDLTEARVQVWFQNRRAKFRKQERAASAKGAAG

SEQ ID NO: 505 - protein, 80 aa, Homo sapiens
LLLHGPFARKPKRIRTAFSPSQLLRLERAFEKNHYVVGAERKQLAGSLSLSETQVKVWFQNRRTKYKRQKLEEEGPESEQ

SEQ ID NO: 506 - protein, 80 aa, Homo sapiens
SSGNDDDLTIPRAAINKMIKETLPNVRVANDARELVVNCCTEFIHLISSEANEICNKSEKKTISPEHVIQALESLGFGSY

SEQ ID NO: 507 - protein, 80 aa, Homo sapiens
ERRPQAPAKKLRKPRTIYSSLQLQHLNQRFQHTQYLALPERAQLAAQLGLTQTQVKIWFQNKRSKYKKLLKQNSGGQEGD

SEQ ID NO: 508 - protein, 80 aa, Homo sapiens
NVQDRVKRPMNAFIVWSRDQRRKMALENPRMRNSEISKQLGYQWKMLTEAEKWPFFQEAQKLQAMHREKYPNYKYRPRRK

SEQ ID NO: 509 - protein, 80 aa, Homo sapiens
EITRLAVWAAVQAVERKLEAQAMRLLTLEGRTGTNEKKIADCEKTAVEFANHLESKWVVLGTLLQEYGLLQRRLENMENL

SEQ ID NO: 510 - protein, 80 aa, Homo sapiens
CEKDIDECSEGIIECHNHSRCVNLPGWYHCECRSGFHDDGTYSLSGESCIDIDECALRTHTCWNDSACINLAGGFDCLCP

SEQ ID NO: 511 - protein, 80 aa, Homo sapiens
AAISLWTVVAAVQAIERKVEIHSRRLLHLEGRTGTAEKKLASCEKTVTELGNQLEGKWAVLGTLLQEYGLLQRRLENLEN

SEQ ID NO: 512 - protein, 80 aa, Homo sapiens
GQNRPLIKPKRRLSAARRAGTSCANCQTTTTTLWRRNANGDPVCNACGLYYKLHNINRPLTMKKEGIQTRNRKMSSKSKK

SEQ ID NO: 513 - protein, 80 aa, Homo sapiens
HAELPGKHCRRRKARTVFSDSQLSGLEKRFEIQRYLSTPERVELATALSLSETQVKTWFQNRRMKHKKQLRKSQDEPKAP

SEQ ID NO: 514 - protein, 80 aa, Homo sapiens
QDATVYVGGLDEKVSEPLLWELFLQAGPVVNTHMPKDRVTGQHQGYGFVEFLSEEDADYAIKIMNMIKLYGKPIRVNKAS

SEQ ID NO: 515 - protein, 80 aa, Homo sapiens
PIDNDAEGVWSPDIEQSFQEALAIYPPCGRRKIILSDEGKMYGRNELIARYIKLRTGKTRTRKQVSSHIQVLARRKSRDF

SEQ ID NO: 516 - protein, 80 aa, Homo sapiens
GLDNDAEGVWSPDIEQSFQEALAIYPPCGRRKIILSDEGKMYGRNELIARYIKLRTGKTRTRKQVSSHIQVLARKKVREY

SEQ ID NO: 517 - protein, 80 aa, Homo sapiens
DSVGTPQSNGGMRLHDFVSKTVIKPESCVPCGKRIKFGKLSLKCRDCRVVSHPECRDRCPLPCIPTLIGTPVKIGEGMLA

SEQ ID NO: 518 - protein, 80 aa, Homo sapiens
SAPHSMTASSSSVSSPSPGLPRRSAPPSPLCRSLSPGTGGGVRGGVGYLSRGDPVRVLARRVRPDGSVQYLVEWGGGGIF

SEQ ID NO: 519 - protein, 80 aa, Homo sapiens
GDPHYSFNHPFSINNLMSSSEQQHKLDFKAYEQALQYSPYGSTLPASLPLGSASVTTRSPIEPSALEPAYYQGVYSRPVL

SEQ ID NO: 520 - protein, 80 aa, Homo sapiens
GQNRPLIKPKRRLSAARRAGTCCANCQTTTTTLWRRNANGDPVCNACGLYYKLHNVNRPLTMKKEGIQTRNRKMSNKSKK

SEQ ID NO: 521 - protein, 80 aa, Homo sapiens
DSLSGSSLYSTSANLPVMGHEKFPSDLDLDMFNGSLECDMESIIRSELMDADGLDFNFDSLISTQNVVGLNVGNFTGAKQ

SEQ ID NO: 522 - protein, 80 aa, Homo sapiens
TEISLWTVVAAIQAVEKKMESQAARLQSLEGRTGTAEKKLADCEKMAVEFGNQLEGKWAVLGTLLQEYGLLQRRLENVEN

SEQ ID NO: 523 - protein, 80 aa, Homo sapiens
MDSGTRRKNATRETTSTLKAWLQEHRKNPYPTKGEKIMLAIITKMTLTQVSTWFANARRRLKKENKMTWPPRNKCADEKR

SEQ ID NO: 524 - protein, 80 aa, Homo sapiens
NIEKQIYLPSTRAKTSIVWHFFHVDPQYTWRAICNLCEKSVSRGKPGSHLGTSTLQRHLQARHSPHWTRANKFGVASGEE

SEQ ID NO: 525 - protein, 80 aa, Homo sapiens
AKQNDDSEAGAKRPRTTITAKQLETLKNAYKNSPKPARHVREQLSSETGLDMRVVQVWFQNRRAKEKRLKKDAGRHRWGQ

SEQ ID NO: 526 - protein, 80 aa, Homo sapiens
DALSYLDQVKLQFGSQPQVYNDFLDIMKEFKSQSIDTPGVISRVSQLFKGHPDLIMGFNTFLPPGYKIEVQTNDMVNVTT

SEQ ID NO: 527 - protein, 80 aa, Homo sapiens
DDHTVCLWDINAGPKEGKIVDAKAIFTGHSAVVEDVAWHLLHESLFGSVADDQKLMIWDTRSNTTSKPSHLVDAHTAEVN

SEQ ID NO: 528 - protein, 80 aa, Homo sapiens
GSILLDKDGKRKHTRPTFSGQQIFALEKTFEQTKYLAGPERARLAYSLGMTESQVKVWFQNRRTKWRKKHAAEMATAKKK

SEQ ID NO: 529 - protein, 80 aa, Homo sapiens
DPTALVEAIVEEVACPICMTFLREPMSIDCGHSFCHSCLSGLWEIPGESQNWGYTCPLCRAPVQPRNLRPNWQLANVVEK

SEQ ID NO: 530 - protein, 80 aa, Homo sapiens
QSLPKKVSLSSDTTRKPLEIRSPSAESKKPKWVPPAASGGSRSSSSPLVVVSVKSPNQSLRLGLSRLARVKPLHPNATST

SEQ ID NO: 531 - protein, 80 aa, Homo sapiens
AKSSQRKQRDCVNQCKSKPGLSTSIPLRMSSYTFKRPVTRITPHPGNEVRYHQWEESLEKPQQVCWQRRLQGLQAYSSAG

SEQ ID NO: 532 - protein, 80 aa, Homo sapiens
VRMVNGKPKKVRKPRTIYSSFQLAALQRRFQKTQYLALPERAELAASLGLTQTQVKIWFQNKRSKIKKIMKNGEMPPEHS

SEQ ID NO: 533 - protein, 80 aa, Homo sapiens
LQCNNHACGWDGGDCSLNFNDPWKNCTQSLQCWKYFSDGHCDSQCNSAGCLFDGFDCQRAEGQCNPLYDQYCKDHFSDGH

SEQ ID NO: 534 - protein, 80 aa, Homo sapiens
ETWVEEDELFQVQAAPDEDSTTNITKKQKWTVEESEWVKAGVQKYGEGNWAAISKNYPFVNRTAVMIKDRWRTMKRLGMN

SEQ ID NO: 535 - protein, 80 aa, Homo sapiens
AEISLWTVVAAIQAVERKVDAQASQLLNLEGRTGTAEKKLADCEKTAVEFGNHMESKWAVLGTLLQEYGLLQRRLENLEN

SEQ ID NO: 536 - protein, 80 aa, Homo sapiens
LEKRTLFRLDLVPINRSVGLKAKPTKPVTEVLRPVVARYGLDLSGLLVRLSGEKEPLDLGAPISSLDGQRVVLEEKDPSR

SEQ ID NO: 537 - protein, 80 aa, Homo sapiens
PNCLSSSMQLPHGGGRHQELVRFRDVAVVFSPEEWDHLTPEQRNLYKDVMLDNCKYLASLGNWTYKAHVMSSLKQGKEPW

SEQ ID NO: 538 - protein, 80 aa, Homo sapiens
DDYKEGDLRIMPESSESPPTEREPGGVVDGLIGKHVEYTKEDGSKRIGMVIHQVEAKPSVYFIKFDDDFHIYVYDLVKKS

SEQ ID NO: 539 - protein, 80 aa, Homo sapiens
SEPDLPLKRKQRRSRTTFTAEQLEELEKAFERTHYPDIYTREELAQRTKLTEARVQVWFSNRRARWRKQAGANQLAAFNH

SEQ ID NO: 540 - protein, 80 aa, Homo sapiens
AGGVLDKDGKKKHSRPTFSGQQIFALEKTFEQTKYLAGPERARLAYSLGMTESQVKVWFQNRRTKWRKRHAVEMASAKKK

SEQ ID NO: 541 - protein, 80 aa, Homo sapiens
DVMSFSVTVTTIPASQAMNPSSHGQTIPVQAFSEENSIEGTPSKCYCRLKAMIMCKGCGAFCHDDCIGPSKLCVSCLVVR

SEQ ID NO: 542 - protein, 80 aa, Homo sapiens
GGYSSVSSCNGYGRMGLLHQEKLPSDLDGMFIERLDCDMESIIRNDLMDGDTLDFNFDNVLPNQSFPHSVKTTTHSWVSG

SEQ ID NO: 543 - protein, 80 aa, Homo sapiens
GGSPTGFGCKSRPKARSSTGRECVNCGATSTPLWRRDGTGHYLCNACGLYHKMNGQNRPLIKPKRRLSAARRAGTSCANC

SEQ ID NO: 544 - protein, 80 aa, Homo sapiens
GQNRPLIRPKKRLIVSKRAGTQCTNCQTTTTTLWRRNASGDPVCNACGLYYKLHQVNRPLTMRKDGIQTRNRKASGKGKK

SEQ ID NO: 545 - protein, 80 aa, Homo sapiens
PVALLRKQNFQPTAQQQLTKPAKITCANCKKPLQKGQTAYQRKGSAHLFCSTTCLSSFSHKRTQNTRSIICKKDASTKKA

SEQ ID NO: 546 - protein, 80 aa, Homo sapiens
TEITLWTVVAAIQALEKKVDSCLTRLLTLEGRTGTAEKKLADCEKTAVEFGNQLEGKWAVLGTLLQEYGLLQRRLENVEN

SEQ ID NO: 547 - protein, 80 aa, Homo sapiens
KKQRGRPSSQPRRNIVGCRISHGWKEGDEPITQWKGTVLDQVPINPSLYLVKYDGIDCVYGLELHRDERVLSLKILSDRV

SEQ ID NO: 548 - protein, 80 aa, Homo sapiens
WTCDLDDDCGDRSDESASCAYPTCFPLTQFTCNNGRCININWRCDNDNDCGDNSDEAGCSHSCSSTQFKCNSGRCIPEHW

SEQ ID NO: 549 - protein, 80 aa, Homo sapiens
PKGAAAPSASQRRKRTSFSAEQLQLLELVFRRTRYPDIHLRERLAALTLLPESRIQVWFQNRRAKSRRQSGKSFQPLARP

SEQ ID NO: 550 - protein, 80 aa, Homo sapiens
KIKYDWYQTESQVVITLMIKNVQKNDVNVEFSEKELSALVKLPSGEDYNLKLELLHPIIPEQSTFKVLSTKIEIKLKKPE

SEQ ID NO: 551 - protein, 80 aa, Homo sapiens
DPSKEVEYVCELCKGAAPPDSPVVYSDRAGYNKQWHPTCFVCAKCSEPLVDLIYFWKDGAPWCGRHYCESLRPRCSGCDE

SEQ ID NO: 552 - protein, 80 aa, Homo sapiens
GSGAGKAKKSVDKNSNEYRVRRERNNIAVRKSRDKAKQRNVETQQKVLELTSDNDRLRKRVEQLSRELDTLRGIFRQLPE

SEQ ID NO: 553 - protein, 80 aa, Homo sapiens
GPASSFTPKQRSKARSCSEGRECVNCGATATPLWRRDGTGHYLCNACGLYHKMNGQNRPLIKPKRRLSAARRAGTCCANC

SEQ ID NO: 554 - protein, 80 aa, Homo sapiens
KPSDHIKRPMNAFMVWSRGQRRKMAQENPKMHNSEISKRLGAEWKLLSEAEKRPYIDEAKRLRAQHMKEHPDYKYRPRRK

SEQ ID NO: 555 - protein, 80 aa, Homo sapiens
LYSGFQQTADKCSVCGHLIMEMILQALGKSYHPGCFRCSVCNECLDGVPFTVDVENNIYCVRDYHTVFAPKCASCARPIL

SEQ ID NO: 556 - protein, 80 aa, Homo sapiens
HPSQDLVFSASPDATIRIWSVPNASCVQVVRAHESAVTGLSLHATGDYLLSSSDDQYWAFSDIQTGRVLTKVTDETSGCS

SEQ ID NO: 557 - protein, 80 aa, Homo sapiens
ELSAVGERVFAAESIIKRRIRKGRIEYLVKWKGWAIKYSTWEPEENILDSRLIAAFEQKERERELYGPKKRGPKPKTFLL

SEQ ID NO: 558 - protein, 80 aa, Homo sapiens
RTGSDSKSGKPRRARTAFTYEQLVALENKFKATRYLSVCERLNLALSLSLTETQVKIWFQNRRTKWKKQNPGADTSAPTG

SEQ ID NO: 559 - protein, 80 aa, Homo sapiens
VWDLSKIGEEQSPEDAEDGPPELLFIHGGHTAKISDFSWNPNEPWVICSVSEDNIMQVWQMAENIYNDEDPEGSVDPEGQ

SEQ ID NO: 560 - protein, 80 aa, Homo sapiens
ERCTPAGGGAEPRKLSRTPKCARCRNHGVVSCLKGHKRFCRWRDCQCANCLLVVERQRVMAAQVALRRQQATEDKKGLSG

SEQ ID NO: 561 - protein, 80 aa, Homo sapiens
SQPGALIPGDPQAMSQPNRGPSPFSPVQLHQLRAQILAYKMLARGQPLPETLQLAVQGKRTLPGLQQQQQQQQQQQQQQQ

SEQ ID NO: 562 - protein, 573 aa, synthetic construct; identical to SEQ ID NO: 89

SEQ ID NO: 563 - protein, 441 aa, Homo sapiens
MSEREVSTAPAGTDMPAAKKQKLSSDENSNPDLSGDENDDAVSIESGTNTERPDTPTNTPNAPGRKSWGKGKWKSKKCKYSFKCVNSLKEDHNQPLFGVQFNWHSKEGDPLVFATVGSNRVTLYECHSQGEIRLLQSYVDADADENFYTCAWTYDSNTSHPLLAVAGSRGIIRIINPITMQCIKHYVGHGNAINELKFHPRDPNLLLSVSKDHALRLWNIQTDTLVAIFGGVEGHRDEVLSADYDLLGEKIMSCGMDHSLKLWRINSKRMMNAIKESYDYNPNKTNRPFISQKIHFPDFSTRDIHRNYVDCVRWLGDLILSKSCENAIVCWKPGKMEDDIDKIKPSESNVTILGRFDYSQCDIWYMRFSMDFWQKMLALGNQVGKLYVWDLEVEDPHKAKCTTLTHHKCGAAIRQTSFSRDSSILIAVCDDASIWRWDRLR

SEQ ID NO: 564 - protein, 485 aa, Homo sapiens
MPAMVEKGPEVSGKRRGRNNAAASASAAAASAAASAACASPAATAASGAAASSASAAAASAAAAPNNGQNKSLAAAAPNGNSSSNSWEEGSSGSSSDEEHGGGGMRVGPQYQAVVPDFDPAKLARRSQERDNLGMLVWSPNQNLSEAKLDEYIAIAKEKHGYNMEQALGMLFWHKHNIEKSLADLPNFTPFPDEWTVEDKVLFEQAFSFHGKTFHRIQQMLPDKSIASLVKFYYSWKKTRTKTSVMDRHARKQKREREESEDELEEANGNNPIDIEVDQNKESKKEVPPTETVPQVKKEKHSTQAKNRAKRKPPKGMFLSQEDVEAVSANATAATTVLRQLDMELVSVKRQIQNIKQTNSALKEKLDGGIEPYRLPEVIQKCNARWTTEEQLLAVQAIRKYGRDFQAISDVIGNKSVVQVKNFFVNYRRRFNIDEVLQEWEAEHGKEETNGPSNQKPVKSPDNSIKMPEEEDEAPVLDVRYASAS

SEQ ID NO: 565 - protein, 77 aa, synthetic construct
TGRTLVTFKDVFVDFTREEWKLLDTAQQIVYRNVMLENYKNLVSLGYQLTKPDVILRLEKGEEPLEINLWITKFVKD

SEQ ID NO: 566 - protein, 120 aa, synthetic construct
MYPYDVPDYASPKKKRKVGGGASMDAKSLTAWSRTLVTFKDVFVDFTREEWKLLDTAQQIVYRNVMLENYKNLVSLGYQLTKPDVILRLEKGEEPWLVEREIHQETHPDSETAFEIKSSV

SEQ ID NO: 567 - protein, 117 aa, synthetic construct
ALSPQHSAVTQGSIIKNKEGMDAKSLTAWSRTLVTFKDVFVDFTREEWKLLDTAQQIVYRNVMLENYKNLVSLGYQLTKPDVILRLEKGEEPWLVEREIHQETHPDSETAFEIKSSV

SEQ ID NO: 568 - protein, 62 aa, synthetic construct
RTLVTFKDVFVDFTREEWKLLDTAQQIVYRNVMLENYKNLVSLGYQLTKPDVILRLEKGEEP

SEQ ID NO: 569 - protein, 98 aa, synthetic construct
RTLVTFKDVFVDFTREEWKLLDTAQQIVYRNVMLENYKNLVSLGYQLTKPDVILRLEKGEEPWLVEREIHQETHPDSETAFEIKSSVSSRSIFKDKQS

SEQ ID NO: 570 - protein, 99 aa, synthetic construct
RTLVTFKDVAVDFTQEEWQQLDPAQKIVYRDVMLENYSNLVSVGYQLTKPDVILRLEQKGEEPWLVEEEIHQETHPDSETAFEIKSSVSSRSIFKDKQS

SEQ ID NO: 571 - protein, 95 aa, synthetic construct
RTLVTFKDVFVDFTREEWKLLDTAQQIVYRNVMLENYKNLVSLGYQLTKPDVILRLEKGEEPWLEEEEVLGSGRAEKNGDIGGQIWKPKDVKESL

SEQ ID NO: 572 - protein, 103 aa, synthetic construct
MNNSQGRVTFEDVTVNFTQGEWQRLNPEQRNLYRDVMLENYSNLVSVGQGETTKPDVILRLEQGKEPWLVEREIHQETHPDSETAFEIKSSVSSRSIFKDKQS

SEQ ID NO: 573 - protein, 1615 aa, Homo sapiens
MPARTAPARVPTLAVPAISLPDDVRRRLKDLERDSLTEKECVKEKLNLLHEFLQTEIKNQLCDLETKLRKEELSEEGYLAKVKSLLNKDLSLENGAHAYNREVNGRLENGNQARSEARRVGMADANSPPKPLSKPRTPRRSKSDGEAKPEPSPSPRITRKSTRQTTITSHFAKGPAKRKPQEESERAKSDESIKEEDKDQDEKRRRVTSRERVARPLPAEEPERAKSGTRTEKEEERDEKEEKRLRSQTKEPTPKQKLKEEPDREARAGVQADEDEDGDEKDEKKHRSQPKDLAAKRRPEEKEPEKVNPQISDEKDEDEKEEKRRKTTPKEPTEKKMARAKTVMNSKTHPPKCIQCGQYLDDPLKYGQHPPDAVDEPQMLTNEKLSIFDANESGFESYEALPQHKLTCFSVYCKHGHLCPIDTGLIEKNIELFFSGSAKPIYDDDPSLEGGVNGKNLGPINEWWITGFDGGEKALIGFSTSFAEYILMDPSPEYAPIFGLMQEKIYISKIVVEFLQSNSDSTYEDLINKIETTVPPSGLNLNRFTEDSLLRHAQFVVEQVESYDEAGDSDEQPIFLTPCMRDLIKLAGVTLGQRRAQARRQTIRHSTREKDRGPTKATTTKLVYQIFDTFFAEQIEKDDREDKENAFKRRRCGVCEVCQQPECGKCKACKDMVKFGGSGRSKQACQERRCPNMAMKEADDDEEVDDNIPEMPSPKKMHQGKKKKQNKNRISWVGEAVKTDGKKSYYKKVCIDAETLEVGDCVSVIPDDSSKPLYLARVTALWEDSSNGQMFHAHWFCAGTDTVLGATSDPLELFLVDECEDMQLSYIHSKVKVIYKAPSENWAMEGGMDPESLLEGDDGKTYFYQLWYDQDYARFESPPKTQPTEDNKFKFCVSCARLAEMRQKEIPRVLEQLEDLDSRVLYYSATKNGILYRVGDGVYLPPEAFTFNIKLSSPVKRPRKEPVDEDLYPEHYRKYSDYIKGSNLDAPEPYRIGRIKEIFCPKKSNGRPNETDIKIRVNKFYRPENTHKSTPASYHADINLLYWSDEEAVVDFKAVQGRCTVEYGEDLPECVQVYSMGGPNRFYFLEAYNAKSKSFEDPPNHARSPGNKGKGKGKGKGKPKSQACEPSEPEIEIKLPKLRTLDVFSGCGGLSEGFHQAGISDTLWAIEMWDPAAQAFRLNNPGSTVFTEDCNILLKLVMAGETTNSRGQRLPQKGDVEMLCGGPPCQGFSGMNRFNSRTYSKFKNSLVVSFLSYCDYYRPRFFLLENVRNFVSFKRSMVLKLTLRCLVRMGYQCTFGVLQAGQYGVAQTRRRAIILAAAPGEKLPLFPEPLHVFAPRACQLSVVVDDKKFVSNITRLSSGPFRTITVRDTMSDLPEVRNGASALEISYNGEPQSWFQRQLRGAQYQPILRDHICKDMSALVAARMRHIPLAPGSDWRDLPNIEVRLSDGTMARKLRYTHHDRKNGRSSSGALRGVCSCVEAGKACDPAARQFNTLIPWCLPHTGNRHNHWAGLYGRLEWDGFFSTTVTNPEPMGKQGRVLHPEQHRVVSVRECARSQGFPDTYRLFGNILDKHRQVGNAVPPPLAKAIGLEIKLCMLAKARESASAKIKEEEAAKD

SEQ ID NO: 574 - protein, 912 aa, Homo sapiens
MPAMPSSGPGDTSSSAAEREEDRKDGEEQEEPRGKEERQEPSTTARKVGRPGRKRKHPPVESGDTPKDPAVISKSPSMAQDSGASELLPNGDLEKRSEPQPEEGSPAGGQKGGAPAEGEGAAETLPEASRAVENGCCTPKEGRGAPAEAGKEQKETNIESMKMEGSRGRLRGGLGWESSLRQRPMPRLTFQAGDPYYISKRKRDEWLARWKREAEKKAKVIAGMNAVEENQGPGESQKVEEASPPAVQQPTDPASPTVATTPEPVGSDAGDKNATKAGDDEPEYEDGRGFGIGELVWGKLRGFSWWPGRIVSWWMTGRSRAAEGTRWVMWFGDGKFSVVCVEKLMPLSSFCSAFHQATYNKQPMYRKAIYEVLQVASSRAGKLFPVCHDSDESDTAKAVEVQNKPMIEWALGGFQPSGPKGLEPPEEEKNPYKEVYTDMWVEPEAAAYAPPPPAKKPRKSTAEKPKVKEIIDERTRERLVYEVRQKCRNIEDICISCGSLNVTLEHPLFVGGMCQNCKNCFLECAYQYDDDGYQSYCTICCGGREVLMCGNNNCCRCFCVECVDLLVGPGAAQAAIKEDPWNCYMCGHKGTYGLLRRREDWPSRLQMFFANNHDQEFDPPKVYPPVPAEKRKPIRVLSLFDGIATGLLVLKDLGIQVDRYIASEVCEDSITVGMVRHQGKIMYVGDVRSVTQKHIQEWGPFDLVIGGSPCNDLSIVNPARKGLYEGTGRLFFEFYRLLHDARPKEGDDRPFFWLFENVVAMGVSDKRDISRFLESNPVMIDAKEVSAAHRARYFWGNLPGMNRPLASTVNDKLELQECLEHGRIAKFSKVRTITTRSNSIKQGKDQHFPVFMNEKEDILWCTEMERVFGFPVHYTDVSNMSRLARQRLLGRSWSVPVIRHLFAPLKEYFACV

SEQ ID NO: 575 - protein, 301 aa, Homo sapiens
NHDQEFDPPKVYPPVPAEKRKPIRVLSLFDGIATGLLVLKDLGIQVDRYIASEVCEDSITVGMVRHQGKIMYVGDVRSVTQKHIQEWGPFDLVIGGSPCNDLSIVNPARKGLYEGTGRLFFEFYRLLHDARPKEGDDRPFFWLFENVVAMGVSDKRDISRFLESNPVMIDAKEVSAAHRARYFWGNLPGMNRPLASTVNDKLELQECLEHGRIAKFSKVRTITTRSNSIKQGKDQHFPVFMNEKEDILWCTEMERVFGFPVHYTDVSNMSRLARQRLLGRSWSVPVIRHLFAPLKEYFACV

SEQ ID NO: 576 - protein, 853 aa, Homo sapiens
MKGDTRHLNGEEDAGGREDSILVNGACSDQSSDSPPILEAIRTPEIRGRRSSSRLSKREVSSLLSYTQDLTGDGDGEDGDGSDTPVMPKLFRETRTRSESPAVRTRNNNSVSSRERHRPSPRSTRGRQGRNHVDESPVEFPATRSLRRRATASAGTPWPSPPSSYLTIDLTDDTEDTHGTPQSSSTPYARLAQDSQQGGMESPQVEADSGDGDSSEYQDGKEFGIGDLVWGKIKGFSWWPAMVVSWKATSKRQAMSGMRWVQWFGDGKFSEVSADKLVALGLFSQHFNLATFNKLVSYRKAMYHALEKARVRAGKTFPSSPGDSLEDQLKPMLEWAHGGFKPTGIEGLKPNNTQPVVNKSKVRRAGSRKLESRKYENKTRRRTADDSATSDYCPAPKRLKTNCYNNGKDRGDEDQSREQMASDVANNKSSLEDGCLSCGRKNPVSFHPLFEGGLCQTCRDRFLELFYMYDDDGYQSYCTVCCEGRELLLCSNTSCCRCFCVECLEVLVGTGTAAEAKLQEPWSCYMCLPQRCHGVLRRRKDWNVRLQAFFTSDTGLEYEAPKLYPAIPAARRRPIRVLSLFDGIATGYLVLKELGIKVGKYVASEVCEESIAVGTVKHEGNIKYVNDVRNITKKNIEEWGPFDLVIGGSPCNDLSNVNPARKGLYEGTGRLFFEFYHLLNYSRPKEGDDRPFFWMFENVVAMKVGDKRDISRFLECNPVMIDAIKVSAAHRARYFWGNLPGMNRPVIASKNDKLELQDCLEYNRIAKLKKVQTITTKSNSIKQGKNQLFPVVMNGKEDVLWCTELERIFGFPVHYTDVSNMGRGARQKLLGRSWSVPVIRHLFAPLKDYFACE

SEQ ID NO: 577 - protein, 740 aa, Mus musculus
MRGGSRHLSNEEDVSGCEDCIIISGTCSDQSSDPKTVPLTQVLEAVCTVENRGCRTSSQPSKRKASSLISYVQDLTGDGDEDRDGEVGGSSGSGTPVMPQLFCETRIPSKTPAPLSWQANTSASTPWLSPASPYPIIDLTDEDVIPQSISTPSVDWSQDSHQEGMDTTQVDAESRDGGNIEYQVSADKLLLSQSCILAAFYKLVPYRESIYRTLEKARVRAGKACPSSPGESLEDQLKPMLEWAHGGFKPTGIEGLKPNKKQPENKSRRRTTNDPAASESSPPKRLKTNSYGGKDRGEDEESREQMASDVTNNKGNLEDHCLSCGRKDPVSFHPLFEGGLCQSCRDRFLELFYMYDEDGYQSYCTVCCEGRELLLCSNTSCCRCFCVECLEVLVGAGTAEDVKLQEPWSCYMCLPQRCHGVLRRRKDWNMRLQDFFTTDPDLEEFEPPKLYPAIPAAKRRPIRVLSLFDGIATGYLVLKELGIKVEKYIASEVCAESIAVGTVKHEGQIKYVDDIRNITKEHIDEWGPFDLVIGGSPCNDLSCVNPVRKGLFEGTGRLFFEFYRLLNYSCPEEEDDRPFFWMFENVVAMEVGDKRDISRFLECNPVMIDAIKVSAAHRARYFWGNLPGMNRPVMASKNDKLELQDCLEFSRTAKLKKVQTITTKSNSIRQGKNQLFPVVMNGKDDVLWCTELERIFGFPEHYTDVSNMGRGARQKLLGRSWSVPVIRHLFAPLKDHFACE

SEQ ID NO: 578 - protein, 387 aa, Homo sapiens
MAAIPALDPEAEPSMDVILVGSSELSSSVSPGTGRDLIAYEVKANQRNIEDICICCGSLQVHTQHPLFEGGICAPCKDKFLDALFLYDDDGYQSYCSICCSGETLLICGNPDCTRCYCFECVDSLVGPGTSGKVHAMSNWVCYLCLPSSRSGLLQRRRKWRSQLKAFYDRESENPLEMFETVPVWRRQPVRVLSLFEDIKKELTSLGFLESGSDPGQLKHVVDVTDTVRKDVEEWGPFDLVYGATPPLGHTCDRPPSWYLFQFHRLLQYARPKPGSPRPFFWMFVDNLVLNKEDLDVASRFLEMEPVTIPDVHGGSLQNAVRVWSNIPAIRSSRHWALVSEEELSLLAQNKQSSKLAAKWPTKLVKNCFLPLREYFKYFSTELTSSL

SEQ ID NO: 579 - protein, 213 aa, Homo sapiens
NPLEMFETVPVWRRQPVRVLSLFEDIKKELTSLGFLESGSDPGQLKHVVDVTDTVRKDVEEWGPFDLVYGATPPLGHTCDRPPSWYLFQFHRLLQYARPKPGSPRPFFWMFVDNLVLNKEDLDVASRFLEMEPVTIPDVHGGSLQNAVRVWSNIPAIRSRHWALVSEEELSLLAQNKQSSKLAAKWPTKLVKNCFLPLREYFKYFSTELTSSL

SEQ ID NO: 580 - protein, 421 aa, Mus musculus
MGSRETPSSCSKTLETLDLETSDSSSPDADSPLEEQWLKSSPALKEDSVDVVLEDCKEPLSPSSPPTGREMIRYEVKVNRRSIEDICLCCGTLQVYTRHPLFEGGLCAPCKDKFLESLFLYDDDGHQSYCTICCSGGTLFICESPDCTRCYCFECVDILVGPGTSERINAMACWVCFLCLPFSRSGLLQRRKRWRHQLKAFHDQEGAGPMEIYKTVSAWKRQPVRVLSLFRNIDKVLKSLGFLESGSGSGGGTLKYVEDVTNVVRRDVEKWGPFDLVYGSTQPLGSSCDRCPGWYMFQFHRILQYALPRQESQRPFFWIFMDNLLLTEDDQETTTRFLQTEAVTLQDVRGRDYQNAMRVWSNIPGLKSKHAPLTPKEEEYLQAQVRSRSKLDAPKVDLLVKNCLLPLREYFKYFSQNSLPL

SEQ ID NO: 581 - protein, 214 aa, Mus musculus
GPMEIYKTVSAWKRQPVRVLSLFRNIDKVLKSLGFLESGSGSGGGTLKYVEDVTNVVRRDVEKWGPFDLVYGSTQPLGSSCDRCPGWYMFQFHRILQYALPRQESQRPFFWIFMDNLLLTEDDQETTTRFLQTEAVTLQDVRGRDYQNAMRVWSNIPGLKSKHAPLTPKEEEYLQAQVRSRSKLDAPKVDLLVKNCLLPLREYFKYFSQNSLPL

SEQ ID NO: 582 - protein, 403 aa, Ailuropoda melanoleuca
MALSPTGTLSVETLDRSDPDPLDEGPWQATCEILLEPDAEHSTDVILVGSSELSAPASPGPRRDLLAYEVKVNQRDIEDVCICCGSLRVHTQHPLFEGGMCAPCKDKFLDCLFLYDDDGYQSYCSICCAGETLLICENPDCTRPSLMMKLRLFRECACLIFPSEGMLLQTVWFWKMTVVWQPGLRHLPQENPLETYKTVPVWKREPVRVLSLFGDIRRELMSLGFLESGSAPGRLKHLDDVTDVVRKDVEGWGPFDLVYGSTPPIGHACDHPPVWYLLQFHRILQYARPRPGSQQPFFWMFVDNLVLSQDDQTAATRFLEADPVTIQDVCGRAVRNTVHVWSNIPAVRSRHSALALCEELSLLAQDRQRTKPPAQGPAQLVKNCFLPLREYFKYFSTELTSSL

SEQ ID NO: 583 - protein, 213 aa, Ailuropoda melanoleuca
NPLETYKTVPVWKREPVRVLSLFGDIRRELMSLGFLESGSAPGRLKHLDDVTDVVRKDVEGWGPFDLVYGSTPPIGHACDHPPVWYLLQFHRILQYARPRPGSQQPFFWMFVDNLVLSQDDQTAATRFLEADPVTIQDVCGRAVRNTVHVWSNIPAVRSRHSALALCEELSLLAQDRQRTKPPAQGPAQLVKNCFLPLREYFKYFSTELTSSL

SEQ ID NO: 584 - protein, 426 aa, Carlito syrichta
MALSCRRTLPLESLHSSNSDLASQLDKEQWRPPCETHGIPVAAAPVLDLEAECSLDVILVGSSELSTSSSPRLGRDHIAYEVKVNQRNIEDICLCCGSFLVHTQHPLFEGGMCAPCKDKFLDTLFLYDEDGYQSYCSICCSGETLLICENPDCTRCYCFECLDTLVSPGTSEKVHAMSNWVCFLCLPFTRSGLLQRRRKWRGQLKAFYDRESESSLEMYKTVPVWKREPVRVLSLFGDIKKELMSLGFVETGSDPGRLRHLDDTTNIVRRNVEEWGPFHLLYGATPPLGHTCDRPPGWYLFQFHRLLQYARPQPGSPQPFFWMFVDNVMLTREDRAIASRFLETEPVTIPDIHGRALQNAVCVWSNIPAVRSKHSALVSEEELSLLAQDRQRAKLPTQGPTKLVKNCFLPLREYFKYFSTELTSFL

SEQ ID NO: 585 - protein, 213 aa, Carlito syrichta
SSLEMYKTVPVWKREPVRVLSLFGDIKKELMSLGFVETGSDPGRLRHLDDTTNIVRRNVEEWGPFHLLYGATPPLGHTCDRPPGWYLFQFHRLLQYARPQPGSPQPFFWMFVDNVMLTREDRAIASRFLETEPVTIPDIHGRALQNAVCVWSNIPAVRSKHSALVSEEELSLLAQDRQRAKLPTQGPTKLVKNCFLPLREYFKYFSTELTSFL

SEQ ID NO: 586 - protein, 424 aa, Meriones unguiculatus
MGSQETPSTRAKTPGTWNLESTDSSSPESLGHLEEQWANSSPDLKDEHSKDVEPEDSKELISSASPPSGREIIRYEISVNQRNIEDICLCCGTLQVYKQHPLFEGGICAPCKDKFLETFFLYDEDGHQSYCSICCSGGTLFICESPDCTRCYCFECVDILVGPGTSERINAMPCWVCFLCLPFTRSGLLQRRRKWRHQLKAFFDEGGASPLEMYKTVSAWKRKPMRVLSLFKNIDKELKNLGFLESGSGSEEERLKYLEDVTNVVRRDVEKWGPFDLVYGSTRPRGSSCDHCPAWYMFQFHRILQYARPPSGSEQPFFWVFVDNLLMTEDDQITADRFLQMKAVTLQDVRGRVLQNAVRVWSNIPGVKSKHMALTEKEEQSLEAQAGTRTKLSAQKVDPLVKNCLLPLREYFKFFSQNSLPLDK

SEQ ID NO: 587 - protein, 216 aa, Meriones unguiculatus
SPLEMYKTVSAWKRKPMRVLSLFKNIDKELKNLGFLESGSGSEEERLKYLEDVTNVVRRDVEKWGPFDLVYGSTRPRGSSCDHCPAWYMFQFHRILQYARPPSGSEQPFFWVFVDNLLMTEDDQITADRFLQMKAVTLQDVRGRVLQNAVRVWSNIPGVKSKHMALTEKEEQSLEAQAGTRTKLSAQKVDPLVKNCLLPLREYFKFFSQNSLPLDK

SEQ ID NO: 588 - protein, 409 aa, Ochotona princeps
MALPSPETLDSLDRVPASHPDEQHWTVCDNSDPILEVEAEGSMDVILVDDSPAPSGRDRIELEVKVNQRSIEDLCLCCGSSQVHRQHPLFQGGLCAPCKDKFLEALFLYDEDGYQSYCSICGLGDTLLVCESPDCTRGYCFACVDGLVGAGSSGHMHTVSPWVCFLCVPGSRHGLLQRRRRWRTQLKVFHEQEAAQPLEIYETVPACRRKPLRVLSLFEHIEKELASLGFLETGSSPGRIRHLDDVTDVVRRDVEQWGPFDLVYGSTPPLGHASPRSPGWYLFQFHRMLQYTQPTASTQRPFFWMFVDNLLLTRDDLVTATRFLEVEPATLQDVRGRVLQGAMRVWSNIPAVNSRHTELAPEAETALLAQSCRRAKASGEGLARLLKSCFLPLREYFKYFPQSPLPLRK

SEQ ID NO: 589 - protein, 214 aa, Ochotona princeps
QPLEIYETVPACRRKPLRVLSLFEHIEKELASLGFLETGSSPGRIRHLDDVTDVVRRDVEQWGPFDLVYGSTPPLGHASPRSPGWYLFQFHRMLQYTQPTASTQRPFFWMFVDNLLLTRDDLVTATRFLEVEPATLQDVRGRVLQGAMRVWSNIPAVNSRHTELAPEAETALLAQSCRRAKASGEGLARLLKSCFLPLREYFKYFPQSPLPLRK

SEQ ID NO: 590 - protein, 224 aa, unidentified
  source 1..224: note = Neosciurus carolinensis
MGGPRPAAVEESPHEIYKTVPAWKREPMRVLSLFGDIGKELTSLGFLETGSEAGRLKHLEDVTDTVRRDVEEWGPFDLVYGSTPALGHSCDRSPGWYLFQFHRLLQYARPRLGSPKPFFWMFVDNLLLTKDDQAIASRFLEMEPVTLQDVHGRVLQNAVRVWTNVPAVKSRHSALASEEELLLVQDGQRGRLPAQGPAALVKHCFLPLREYFKYFSQNTLPLYK

SEQ ID NO: 591 - protein, 213 aa, unidentified
  source 1..213: note = Neosciurus carolinensis
SPHEIYKTVPAWKREPMRVLSLFGDIGKELTSLGFLETGSEAGRLKHLEDVTDTVRRDVEEWGPFDLVYGSTPALGHSCDRSPGWYLFQFHRLLQYARPRLGSPKPFFWMFVDNLLLTKDDQAIASRFLEMEPVTLQDVHGRVLQNAVRVWTNVPAVKSRHSALASEEELLLVQDGQRGRLPAQGPAALVKHCFLPLREYFKYFSQNTLPLYK

SEQ ID NO: 592 - protein, 417 aa, Bison bison
MARSSPGTLNLEIMDGSDPDPALPPDREQWPPPCEILLDPEPEHSLDIILVGSSELSSPPSPGPRRDFIAYEVKVNQRDIEDVCICCGSLQLHTQHPLFEGGMCAPCKDKFLECLFLYDDDGYQSYCSICCAGETLLICENPDCTRCYCFECVDTLVGPGTSGKVHAMSNWVCFLCLPFPRSGLLQRRRKWRTWLKAFYDREAESPLVMYKTVPVWKREPIRVLSLFGDIKKELTSLGFLEDGSKPGRLKHLDDVTNIVRRDIDEWGPFDLTYGSTPTLGHTCDHPPGWYVYQFHRILQYARPLPGSPQPFFWMFVDNLVLTEEDLDVATRFLETDPVTIQDVRGRTVQNAVHVWSNIPAVKSRHSALVSQEELSLLAQDRQRVKSPVQGPATLVKNCFLPLREYFKYFSTELTSSL

SEQ ID NO: 593 - protein, 213 aa, Bison bison
SPLVMYKTVPVWKREPIRVLSLFGDIKKELTSLGFLEDGSKPGRLKHLDDVTNIVRRDIDEWGPFDLTYGSTPTLGHTCDHPPGWYVYQFHRILQYARPLPGSPQPFFWMFVDNLVLTEEDLDVATRFLETDPVTIQDVRGRTVQNAVHVWSNIPAVKSRHSALVSQEELSLLAQDRQRVKSPVQGPATLVKNCFLPLREYFKYFSTELTSSL

SEQ ID NO: 594 - protein, 443 aa, Equus przewalskii
MALSSPGTLSLETLDSWDPDVAGQLDEERWQPSSEIVGRPMAAAPVLDLEEEPSMDIILVDSSELSSPPSPGPSRDMCICCGSFQVHTQHPLFEGGMCAACKDKFLSCLFLYDDDGNQSYCSICCSGETLLICENPDCTRCYCFECVDTLVSPRTSEKVQAMSNWVCFLCLPFPRSGLLQRRRKWRGWLKAFYDQEAVRSRSAWGRRMRSGPHLVGFLWLLVAKCPSALESPLEMYKTVPVWKREPVRVLSLFGDIKKELTTLGFLENGSDPGRLKHLDDVTNTVRRDVEEWGPFDLVYGSTPPLGHACDHPPGWYLFQFHRVLQYARPRPGSPQAFFWMFVDNLVLTEDDRAVATRFLETDPVTIQDVCGRAVRNAVHVWSNIPAVKSRHSALFSQEESFLRAQDRQRAKPPARGPAKLVKNCFLPLREYFKYFSTEFTSSL

SEQ ID NO: 595 - protein, 213 aa, Equus przewalskii
SPLEMYKTVPVWKREPVRVLSLFGDIKKELTTLGFLENGSDPGRLKHLDDVTNTVRRDVEEWGPFDLVYGSTPPLGHACDHPPGWYLFQFHRVLQYARPRPGSPQAFFWMFVDNLVLTEDDRAVATRFLETDPVTIQDVCGRAVRNAVHVWSNIPAVKSRHSALFSQEESFLRAQDRQRAKPPARGPAKLVKNCFLPLREYFKYFSTEFTSSL

SEQ ID NO: 596 - protein, 415 aa, Mus caroli
MGSRETPSSFSKTLETLDLETSDSSSPDADSPLEEQWLKSSPALKEDNVDMVLEDCKEPLSPSSPPTGREMIRYEVKVNRRSIEDICLCCGTLQVYTQHPLFEGGICAPCKDKFLESLFLYDDDGHQSYCTICCSGGTLFICESPDCTRCYCFECVDILVGPGTSERINAMACWVCFLCLPFSRSGLLQRRKRWRHQLKAFHDQEGAGPMEIYKTVSTWKRQPVRVLSLFGNIDKVLKSLGFLESGSGSGGGTLKYVEDVTNVVRRDVEKWGPFDLVYGSTQPLGSSCDRCPGWYMFQFHRILQYALPRQESQRPFFWIFMDNLLMTEDDQETTARFLQTEAVTLQDVRGRDYQNVMRVWSNIPGLKSKHVPLTPKEEEYLQAQVRTRSKLDAQKVDLLVKNCLLPLREYFKYFS

SEQ ID NO: 597 - protein, 208 aa, Mus caroli
GPMEIYKTVSTWKRQPVRVLSLFGNIDKVLKSLGFLESGSGSGGGTLKYVEDVTNVVRRDVEKWGPFDLVYGSTQPLGSSCDRCPGWYMFQFHRILQYALPRQESQRPFFWIFMDNLLMTEDDQETTARFLQTEAVTLQDVRGRDYQNVMRVWSNIPGLKSKHVPLTPKEEEYLQAQVRTRSKLDAQKVDLLVKNCLLPLREYFKYFS

SEQ ID NO: 598 - protein, 387 aa, Pan troglodytes
MAAIPALDPEAEPSMDVILVGSSELSSSISPRTGRDLIAYEVKANQRNIEDICICCGSLQVHTQHPLFEGGICAPCKDKSLDALFLYDDDGYQSYCSICCSGETLLICGNPDCTRCYCFECVDSLVGPGTSGKVHAMSNWVCYLCLPSSRSGLLQRRRKWRSQLKAFYDRESENPLEMFETVPVWRRQPVRVLSLFEDIKKELTSLGFLESGSDPGQLKHVVDVTDTVRKDVEEWGPFDLVYGATPPLGHTCDRPPSWYLFQFHRLLQYARPKPGSPRPFFWMFVDNLVLNKEDLDVASRFLEMEPVTIPDVHGGSLQNAVRVWSNIPAIRSSRHWALVSEEELSLLAQNKQSSKLAAKWPTKLVKNCFLPLREYFKYFSTELTSSL

SEQ ID NO: 599 - protein, 214 aa, Pan troglodytes
NPLEMFETVPVWRRQPVRVLSLFEDIKKELTSLGFLESGSDPGQLKHVVDVTDTVRKDVEEWGPFDLVYGATPPLGHTCDRPPSWYLFQFHRLLQYARPKPGSPRPFFWMFVDNLVLNKEDLDVASRFLEMEPVTIPDVHGGSLQNAVRVWSNIPAIRSSRHWALVSEEELSLLAQNKQSSKLAAKWPTKLVKNCFLPLREYFKYFSTELTSSL

SEQ ID NO: 600 - protein, 391 aa, Homo sapiens
MEPLRVLELYSGVGGMHHALRESCIPAQVVAAIDVNTVANEVYKYNFPHTQLLAKTIEGITLEEFDRLSFDMILMSPPCQPFTRIGRQGDMTDSRTNSFLHILDILPRLQKLPKYILLENVKGFEVSSTRDLLIQTIENCGFQYQEFLLSPTSLGIPNSRLRYFLIAKLQSEPLPFQAPGQVLMEFPKIESVHPQKYAMDVENKIQEKNVEPNISFDGSIQCSGKDAILFKLETAEEIHRKNQQDSDLSVKMLKDFLEDDTDVNQYLLPPKSLLRYALLLDIVQPTCRRSVCFTKGYGSYIEGTGSVLQTAEDVQVENIYKSLTNLSQEEQITKLLILKLRYFTPKEIANLLGFPPEFGFPEKITVKQRYRLLGNSLNVHVVAKLIKILYE

SEQ ID NO: 601 - protein, 353 aa, unidentified
  source 1..353: note = Mycoplasmatales bacterium
MAEWYIPAIVSYQAIHNGFTLNKINHKIELQTMIDYLESKTLSMNSKEPVKRGFWYKKHLDEIRIVYTAVKMSEQEGNIFDVRTLFERGLSDIDLLTYSFPCQDLSQQGKQKGMGRDSQTRSGLLWEIEKALDTSKKEDLPKYLLMENVVALTHKVNAEELDEWMMKLESLGYKNDLRILNAGDFGSSQARRRTFMISTLNEKVELPVGNKKPKSMNKILNDEPTRKDFLPALDKFDLTEYKWTKSNINKAKLINYSTFNSEAYVYDSNFTGPTLTASGANSRIKFEYNGKIRKIGAEEAYAYMGFKKSDYIKVNKLNYLNETKMIYTCGNSISVEVLRSIMTNINNNFKENK

SEQ ID NO: 602 - protein, 398 aa, unidentified
  source 1..398: note = Mycoplasma marinum
MLFLIGTFKYVLIYITKVIRIFEAFAGIGAQRKALRNIKSNYEVSGMAEWYIPAIVSYQAIHNGFTLSRVDKKTKLTEMIKYLESKTLSMDSKEPVRTGYWFKKHKDMVRIVYSAVKLSEAEGNIFDVRTLHERKLEDIDLLTYSFPCQDLSQQGKQRGMKKDSGTRSGLLWEIEKALEATPKDKLPKYLLMENVVALTHKTNKKDLDNWKRKLRSLGYYNDINVLNAGDFGSSQARRRAFMISTLDSKVTLPLGDKKPQAISKILNKETRSQDFMPALDEYEKTDFKRTLSNIKKCKLIDYTSFNSEAYVYDPKYTGPTLTASGANSRIKFTHQGKMRKINAEEAYRYMGFSTNDYKKVNNLNFLSETKMIYTCGNSISVEVLEEIMLKIIREDNNG

SEQ ID NO: 603 - protein, 381 aa, Spiroplasma chinense
MKKIRLFEAFAGIGSQRRALKSVVGNNFEIAGLAEWYVPAIVMYQIINNDFSKKNVLDNVPRDEVIDYLNSKCLSWDSKKPVSKNFWNRKSQDILNVIYSAVKKSEEEGNIFDVRTLHERTLESIDILTYSFPCQDLSQQGIQKGMKKNSGTRSGLLWEIEKAIDNTPKNNLPKILLMENVPALLNKTNELELKEWLIKLENMGYKNSIGILNAADFGSPQARRRVFMISSRNKKIELPVGKSKPGKLNDILEKNVEDKFIMTNLEKYDFSEFSLTKSNIKKCSLINYTKFNSEAYVYDPDFTGPTLTASGANSRIKIYDKGFIRRMSPLESFRYMGFDDEDYKKIDEFEFLTDTQKIFVCGNSISIEVLKAIFERIDSNE

SEQ ID NO: 604 - protein, 395 aa, Mycoplasma penetrans
MNSNKDKIKVIKVFEAFAGIGSQFKALKNIARSKNWEIQHSGMVEWFVDAIVSYVAIHSKNFNPKIEQLDKDILSISNDSKMPISEYGIKKINNTIKASYLNYAKKHFNNLFDIKKVNKDNFPKNIDIFTYSFPCQDLSVQGLQKGIDKELNTRSGLLWEIERILEEIKNSFSKEEMPKYLLMENVKNLLSHKNKKNYNTWLKQLEKFGYKSKTYLLNSKNFDNCQNRERVFCLSIRDDYLEKTGFKFKELEKVKNPPKKIKDILVDSSNYKYLNLNKYETTTFRETKSNIISRSLKNYTTFNSENYVYNINGIGPTLTASGANSRIKIETQQGVRYLTPLECFKYMQFDVNDFKKVQSTNLISENKMIYIAGNSIPVKILEAIFNTLEFVNNEE

SEQ ID NO: 605 - protein, 386 aa, Spiroplasma monobiae
MSKVENKTKKLRVFEAFAGIGAQRKALEKVRKDEYEIVGLAEWYVPAIVMYQAIHNNFHTKLEYKSVSREEMIDYLENKTLSWNSKNPVSNGYWKRKKDDELKIIYNAIKLSEKEGNIFDIRDLYKRTLKNIDLLTYSFPCQDLSQQGIQKGMKRGSGTRSGLLWEIERALDSTEKNDLPKYLLMENVGALLHKKNEEELNQWKQKLESLGYQNSIEVLNAADFGSSQARRRVFMISTLNEFVELPKGDKKPKSIKKVLNKIVSEKDILNNLLKYNLTEFKKTKSNINKASLIGYSKFNSEGYVYDPEFTGPTLTASGANSRIKIKDGSNIRKMNSDETFLYIGFDSQDGKRVNEIEFLTENQKIFVCGNSISVEVLEAIIDKIGG

SEQ ID NO: 606 - protein, 358 aa, Haemophilus parainfluenzae
MKDVLDDNLLEEPAAQYSLFEPESNPNLREKFTFIDLFAGIGGFRIAMQNLGGKCIFSSEWDEQAQKTYEANFGDLPYGDITLEETKAFIPEKFDILCAGFPCQAFSIAGKRGGFEDTRGTLFFDVAEIIRRHQPKAFFLENVKGLKNHDKGRTLKTILNVLREDLGYFVPEPAIVNAKNFGVPQNRERIYIVGFHKSTGVNSFSYPEPLDKIVTFADIREEKTVPTKYYLSTQYIDTLRKHKERHESKGNGFGYEIIPDDGIANAIVVGGMGRERNLVIDHRITDFTPTTNIKGEVNREGIRKMTPREWARLQGFPDSYVIPVSDASAYKQFGNSVAVPAIQATGKKILEKLGNLYD

SEQ ID NO: 607 - protein, 521 aa, unidentified
  source 1..521: note = Arthrobacter luteus
MSKANAKYSFVDLFAGIGGFHAALAATGGVCEYAVEIDREAAAVYERNWNKPALGDITDDANDEGVTLRGYDGPIDVLTGGFPCQPFSKSGAQHGMAETRGTLFWNIARIIEEREPTVLILENVRNLVGPRHRHEWLTIIETLRFFGYEVSGAPAIFSPHLLPAWMGGTPQVRERVFITATLVPERMRDERIPRTETGEIDAEAIGPKPVATMNDRFPIKKGGTELFHPGDRKSGWNLLTSGIIREGDPEPSNVDLRLTETETLWIDAWDDLESTIRRATGRPLEGFPYWADSWTDFRELSRLVVIRGFQAPEREVVGDRKRYVARTDMPEGFVPASVTRPAIDETLPAWKQSHLRRNYDFFERHFAEVVAWAYRWGVYTDLFPASRRKLEWQAQDAPRLWDTVMHFRPSGIRAKRPTYLPALVAITQTSIVGPLERRLSPRETARLQGLPEWFDFGEQRAAATYKQMGNGVNVGVVRHILREHVRRDRALLKLTPAGQRIINAVLADEPDATVGALGAAE

SEQ ID NO: 608 - protein, 330 aa, Haemophilus aegyptius
MNLISLFSGAGGLDLGFQKAGFRIICANEYDKSIWKTYESNHSAKLIKGDISKISSDEFPKCDGIIGGPPCQSWSEGGSLRGIDDPRGKLFYEYIRILKQKKPIFFLAENVKGMMAQRHNKAVQEFIQEFDNAGYDVHIILLNANDYGVAQDRKRVFYIGFRKELNINYLPPIPHLIKPTFKDVIWDLKDNPIPALDKNKTNGNKCIYPNHEYFIGSYSTIFMSRNRVRQWNEPAFTVQASGRQCQLHPQAPVMLKVSKNLNKFVEGKEHLYRRLTVRECARVQGFPDDFIFHYESLNDGYKMIGNAVPVNLAYEIAKTIKSALEICKGN

SEQ ID NO: 609 - protein, 327 aa, Haemophilus haemolyticus
MIEIKDKQLTGLRFIDLFAGLGGFRLALESCGAECVYSNEWDKYAQEVYEMNFGEKPEGDITQVNEKTIPDHDILCAGFPCQAFSISGKQKGFEDSRGTLFFDIARIVREKKPKVVFMENVKNFASHDNGNTLEVVKNTMNELDYSFHAKVLNALDYGIPQKRERIYMICFRNDLNIQNFQFPKPFELNTFVKDLLLPDSEVEHLVIDRKDLVMTNQEIEQTTPKTVRLGIVGKGGQGERIYSTRGIAITLSAYGGGIFAKTGGYLVNGKTRKLHPRECARVMGYPDSYKVHPSTSQAYKQFGNSVVINVLQYIAYNIGSSLNFKPY

SEQ ID NO: 610 - protein, 418 aa, Moraxella sp.
MKPEILKLIRSKLDLTQKQASEIIEVSDKTWQQWESGKTEMHPAYYSFLQEKLKDKINFEELSAQKTLQKKIFDKYNQNQITKNAEELAEITHIEERKDAYSSDFKFIDLFSGIGGIRQSFEVNGGKCVFSSEIDPFAKFTYYTNFGVVPFGDITKVEATTIPQHDILCAGFPCQPFSHIGKREGFEHPTQGTMFHEIVRIIETKKTPVLFLENVPGLINHDDGNTLKVIIETLEDMGYKVHHTVLDASHFGIPQKRKRFYLVAFLNQNIHFEFPKPPMISKDIGEVLESDVTGYSISEHLQKSYLFKKDDGKPSLIDKNTTGAVKTLVSTYHKIQRLTGTFVKDGETGIRLLTTNECKAIMGFPKDFVIPVSRTQMYRQMGNSVVVPVVTKIAEQISLALKTVNQQSPQENFELELV

SEQ ID NO: 611 - protein, 537 aa, Ascobolus sp.
MSERRYEAGMTVALHEGSFLKIQRVYIRQYHADNRREHMLVGPLFRRTKYLKALSKKVNEVAIVHESIHVPVQDVIGVRELIITNRPFPECRKGDEHTGRLVCRWVYNLDERAKGREYKKQRYIRRITEAEADPEYRVEDRVLRRRWFQEGYIGDEISYKEHGNGDIVDIRSESPLQVLDGWGGDLVDLENGEETSIPGPCRSASSYGRLMKPPLAQAADSNTSRKYTFGDTFCGGGGVSLGARQAGLEVKWAFDMNPNAGANYRRNFPNTDFFLAEAEQFIQLSVGISQHVDILHLSPPCQTFSRAHTIAGKNDENNEASFFAVVNLIKAVRPRLFTVEETDGIMDRQSRQFIDTALMGITELGYSFRICVLNAIEYGVCQNRKRLIIIGAAPGEELPPFPLPTHQDFFSKDPRRDLLPAVTLDDALSTITPESTDHHLNHVWQPAEWKTPYDAHRPFKNAIRAGGGEYDIYPDGRRKFTVRELACIQGFPDEYEFVGTLTDKRRIIGNAVPPPLSAAIMSTLRQWMTEKDFERME

SEQ ID NO: 612 - protein, 1534 aa, Arabidopsis sp.
MVENGAKAAKRKKRPLPEIQEVEDVPRTRRPRRAAACTSFKEKSIRVCEKSATIEVKKQQIVEEEFLALRLTALETDVEDRPTRRLNDFVLFDSDGVPQPLEMLEIHDIFVSGAILPSDVCTDKEKEKGVRCTSFGRVEHWSISGYEDGSPVIWISTELADYDCRKPAASYRKVYDYFYEKARASVAVYKKLSKSSGGDPDIGLEELLAAVVRSMSSGSKYFSSGAAIIDFVISQGDFIYNQLAGLDETAKKHESSYVEIPVLVALREKSSKIDKPLQRERNPSNGVRIKEVSQVAESEALTSDQLVDGTDDDRRYAILLQDEENRKSMQQPRKNSSSGSASNMFYIKINEDEIANDYPLPSYYKTSEEETDELILYDASYEVQSEHLPHRMLHNWALYNSDLRFISLELLPMKQCDDIDVNIFGSGVVTDDNGSWISLNDPDSGSQSHDPDGMCIFLSQIKEWMIEFGSDDIISISIRTDVAWYRLGKPSKLYAPWWKPVLKTARVGISILTFLRVESRVARLSFADVTKRLSGLQANDKAYISSDPLAVERYLVVHGQIILQLFAVYPDDNVKRCPFVVGLASKLEDRHHTKWIIKKKKISLKELNLNPRAGMAPVASKRKAMQATTTRLVNRIWGEFYSNYSPEDPLQATAAENGEDEVEEEGGNGEEEVEEEGENGLTEDTVPEPVEVQKPHTPKKIRGSSGKREIKWDGESLGKTSAGEPLYQQALVGGEMVAVGGAVTLEVDDPDEMPAIYFVEYMFESTDHCKMLHGRFLQRGSMTVLGNAANERELFLTNECMTTQLKDIKGVASFEIRSRPWGHQYRKKNITADKLDWARALERKVKDLPTEYYCKSLYSPERGGFFSLPLSDIGRSSGFCTSCKIREDEEKRSTIKLNVSKTGFFINGIEYSVEDFVYVNPDSIGGLKEGSKTSFKSGRNIGLRAYVVCQLLEIVPKESRKADLGSFDVKVRRFYRPEDVSAEKAYASDIQELYFSQDTVVLPPGALEGKCEVRKKSDMPLSREYPISDHIFFCDLFFDTSKGSLKQLPANMKPKFSTIKDDTLLRKKKGKGVESEIESEIVKPVEPPKEIRLATLDIFAGCGGLSHGLKKAGVSDAKWAIEYEEPAGQAFKQNHPESTVFVDNCNVILRAIMEKGGDQDDCVSTTEANELAAKLTEEQKSTLPLPGQVDFINGGPPCQGFSGMNRFNQSSWSKVQCEMILAFLSFADYFRPRYFLLENVRTFVSFNKGQTFQLTLASLLEMGYQVRFGILEAGAYGVSQSRKRAFIWAAAPEEVLPEWPEPMHVFGVPKLKISLSQGLHYAAVRSTALGAPFRPITVRDTIGDLPSVENGDSRTNKEYKEVAVSWFQKEIRGNTIALTDHICKAMNELNLIRCKLIPTRPGADWHDLPKRKVTLSDGRVEEMIPFCLPNTAERHNGWKGLYGRLDWQGNFPTSVTDPQPMGKVGMCFHPEQHRILTVRECARSQGFPDSYEFAGNINHKHRQIGNAVPPPLAFALGRKLKEALHLKKSPQHQP

SEQ ID NO: 613 - protein, 1356 aa, Ascobolus sp.
MELTPELSGVSTDLGGGGSIFAHWRMKEESPAPTEILDDLNVLEWEKTTRDYSKEDLRIADQLFSIEDEHQSLPFETADAEDGTPTEEEEEKELPMRTLDNFVLYDASDLELAALDLIGTELNIHAVGTVGPIYTEGEEDEQEDEDEDVSPPVRTGTQATSASVTQMTVELYIRNIVQYEFCFNDDGTVETWIQTTNAHYKLLQPAKCYTSLYRPVNDCLNVITAIITLAPESTTMSLKDLLKVMDDKAQAVSYEEVERMSEFIVQHLDQWMETAPKKKSKLIEKSKVYIDLNNLAGIDMVSGVRPPPVRRVTGRSSAPKKRIVRNMNDAVLLHQNETTVTNWIHQLSAGMFGRALNVLGAETADVENLTCDPASAKFVVPQRRLHKRLKWETRGHIPVSEEEYKHIYQGKKYAKFFEAVRAVDESKLTIKLGDLVYVLDQDPKVTQTQFATAGREGRKKGAEKEKIQVRFGRVLSIRQPDSNSKDAQNVFIHVQWLVLGCDTILQEMASRRELFLTDSCDTVFADVIYGVAKLTPLGAKDIPTVEFHESMATMMGENEFFVRFKYNYQDGSFTDLKDVDAEQIGTLQPRVNTHRNPGYCSNCRIKYDNERTGDKWIYENDTEGEPRLFRSSKGWCIYAQEFVYLQPVEKQPGTTFRVGYISEINKSSVIVELLARVDDDDKSGHISYSDPRHLYFTGTDIKVTFDKIIRKCFVFHDSGDQKAKAPLMYGTLQRDLYYYRYEKRKGKAELVPVREIRSIHEQTLNDWESRTQIERHGAVSGKKLKGLDIFAGCGGLTLGLDLSGAVDTKWDIEFAPSAANTLALNFPDAQVFNQCANVLLSRAIQSEDEGSLDIEYDLQGRVLPDLPKKGEVDFIYGGPPCQGFSGVNRYKKGNDIKNSLVATFLSYVDHYKPRFVLLENVKGLITTKLGNSKNAEGKWEGGISNGVVKFIYRTLISMNYQCRIGLVQSGEYGVPQSRPRVIFLAARMGERLPDLPEPMHAFEVLDSQYALPHIKRYHTTQNGVAPLPRITIGEAVSDLPKFQYANPGVWPRHDPYSSAKAQPSDKTIEKFSVSKATSFVGYLLQPYHSRPQSEFQRRLRTKLVPSDEPAEKTSLLTTKLVTAHVTRLFNKETTQRIVCVPMWPGADHRSLPKEMRPWCLVDPNSQAEKHRFWPGLFGRLGMEDFFSTALTDVQPCGKQGKVLHPTQRRVYTVRELARAQGFPDWFAFTDGDADSGLGGVKKWHRNIGNAVPVPLGEQIGRCIGYSVWWKDDMIAQLREDGADEDEEMIDGNDQWVEELNTQMAADMPGLPLLVTHLLNLCVYRRLYGPNAKEFLPARVYDKKLEGGRRRLVWAML

SEQ ID NO: 614 - protein, 1454 aa, unidentified
  source 1..1454: note = Neurospora
MDSPDRSHGGMFIDVPAETMGFQEDYLDMFASVLSQGLAKEGDYAHHQPLPAGKEECLEPIAVATTITPSPDDPQLQLQLELEQQFQTESGLNGVDPAPAPESEDEADLPDGFSDESPDDDFVVQRSKHITVDLPVSTLINPRSTFQRIDENDNLVPPPQSTPERVAVEDLLKAAKAAGKNKEDYIEFELHDFNFYVNYAYHPQEMRPIQLVATKVLHDKYYFDGVLKYGNTKHYVTGMQVLELPVGNYGASLHSVKGQIWVRSKHNAKKEIYYLLKKPAFEYQRYYQPFLWIADLGKHVVDYCTRMVERKREVTLGCFKSDFIQWASKAHGKSKAFQNWRAQHPSDDFRTSVAANIGYIWKEINGVAGAKRAAGDQLFRELMIVKPGQYFRQEVPPGPVVTEGDRTVAATIVTPYIKECFGHMILGKVLRLAGEDAEKEKEVKLAKRLKIENKNATKADTKDDMKNDTATESLPTPLRSLPVQVLEATPIESDIVSIVSSDLPPSENNPPPLTNGSVKPKAKANPKPKPSTQPLHAAHVKYLSQELVNKIKVGDVISTPRDDSSNTDTKWKPTDTDDHRWFGLVQRVHTAKTKSSGRGLNSKSFDVIWFYRPEDTPCCAMKYKWRNELFLSNHCTCQEGHHARVKGNEVLAVHPVDWFGTPESNKGEFFVRQLYESEQRRWITLQKDHLTCYHNQPPKPPTAPYKPGDTVLATLSPSDKFSDPYEVVEYFTQGEKETAFVRLRKLLRRRKVDRQDAPANELVYTEDLVDVRAERIVGKCIMRCFRPDERVPSPYDRGGTGNMFFITHRQDHGRCVPLDTLPPTLRQGFNPLGNLGKPKLRGMDLYCGGGNFGRGLEEGGVVEMRWANDIWDKAIHTYMANTPDPNKTNPFLGSVDDLLRLALEGKFSDNVPRPGEVDFIAAGSPCPGFSLLTQDKKVLNQVKNQSLVASFASFVDFYRPKYGVLENVSGIVQTFVNRKQDVLSQLFCALVGMGYQAQLILGDAWAHGAPQSRERVFLYFAAPGLPLPDPPLPSHSHYRVKNRNIGFLCNGESYVQRSFIPTAFKFVSAGEGTADLPKIGDGKPDACVRFPDHRLASGITPYIRAQYACIPTHPYGMNFIKAWNNGNGVMSKSDRDLFPSEGKTRTSDASVGWKRLNPKTLFPTVTTTSNPSDARMGPGLHWDEDRPYTVQEMRRAQGYLDEEVLVGRTTDQWKLVGNSVSRHMALAIGLKFREAWLGTLYDESAVVATATATATTAAAVGVTVPVMEEPGIGTTESSRPSRSPVHTAVDLDDSKSERSRSTTPATVLSTSSAAGDGSANAAGLEDDDNDDMEMMEVTRKRSSPAVDEEGMRPSKVQKVEVTVASPASRRSSRQASRNPTASPSSKASKATTHEAPAPEELESDAESYSETYDKEGFDGDYHSGHEDQYSEEDEEEEYAEPETMTVNGMTIVKL

SEQ ID NO: 615 - protein, 345 aa, Drosophila sp.
MVFRVLELFSGIGGMHYAFNYAQLDGQIVAALDVNTVANAVYAHNYGSNLVKTRNIQSLSVKEVTKLQANMLLMSPPCQPHTRQGLQRDTEDKRSDALTHLCGLIPECQELEYILMENVKGFESSQARNQFIESLERSGFHWREFILTPTQFNVPNTRYRYYCIARKGADFPFAGGKIWEEMPGAIAQNQGLSQIAEIVEENVSPDFLVPDDVLTKRVLVMDIIHPAQSRSMCFTKGYTHYTEGTGSAYTPLSEDESHRIFELVKEIDTSNQDASKSEKILQQRLDLLHQVRLRYFTPREVARLMSFPENFEFPPETTNRQKYRLLGNSINVKVVGELIKLLTIK

SEQ ID NO: 616 - protein, 330 aa, unidentified
  source 1..330: note = Schizosaccharomyces pombe
MLSTKRLRVLELYSGIGGMHYALNLANIPADIVCAIDINPQANEIYNLNHGKLAKHMDISTLTAKDFDAFDCKLWTMSPSCQPFTRIGNRKDILDPRSQAFLNILNVLPHVNNLPEYILIENVQGFEESKAAEECRKVLRNCGYNLIEGILSPNQFNIPNSRSRWYGLARLNFKGEWSIDDVFQFSEVAQKEGEVKRIRDYLEIERDWSSYMVLESVLNKWGHQFDIVKPDSSSCCCFTRGYTHLVQGAGSILQMSDHENTHEQFERNRMALQLRYFTAREVARLMGFPESLEWSKSNVTEKCMYRLLGNSINVKVVSYLISLLLEPLNF

SEQ ID NO: 617 - protein, 624 aa, Arabidopsis sp.
MVMSHIFLISQIQEVEHGDSDDVNWNTDDDELAIDNFQFSPSPVHISATSPNSIQNRISDETVASFVEMGFSTQMIARAIEETAGANMEPMMILETLFNYSASTEASSSKSKVINHFIAMGFPEEHVIKAMQEHGDEDVGEITNALLTYAEVDKLRESEDMNININDDDDDNLYSLSSDDEEDELNNSSNEDRILQALIKMGYLREDAAIAIERCGEDASMEEVVDFICAAQMARQFDEIYAEPDKKELMNNNKKRRTYTETPRKPNTDQLISLPKEMIGFGVPNHPGLMMHRPVPIPDIARGPPFFYYENVAMTPKGVWAKISSHLYDIVPEFVDSKHFCAAARKRGYIHNLPIQNRFQIQPPQHNTIQEAFPLTKRWWPSWDGRTKLNCLLTCIASSRLTEKIREALERYDGETPLDVQKWVMYECKKWNLVWVGKNKLAPLDADEMEKLLGFPRDHTRGGGISTTDRYKSLGNSFQVDTVAYHLSVLKPLFPNGINVLSLFTGIGGGEVALHRLQIKMNVVVSVEISDANRNILRSFWEQTNQKGILREFKDVQKLDDNTIERLMDEYGGFDLVIGGSPCNNLAGGNRHHRVGLGGEHSSLFFDYCRILEAVRRKARHMRR

SEQ ID NO: 618 - protein, 626 aa, Arabidopsis sp.
MVIWNNDDDDFLEIDNFQSSPRSSPIHAMQCRVENLAGVAVTTSSLSSPTETTDLVQMGFSDEVFATLFDMGFPVEMISRAIKETGPNVETSVIIDTISKYSSDCEAGSSKSKAIDHFLAMGFDEEKVVKAIQEHGEDNMEAIANALLSCPEAKKLPAAVEEEDGIDWSSSDDDTNYTDMLNSDDEKDPNSNENGSKIRSLVKMGFSELEASLAVERCGENVDIAELTDFLCAAQMAREFSEFYTEHEEQKPRHNIKKRRFESKGEPRSSVDDEPIRLPNPMIGFGVPNEPGLITHRSLPELARGPPFFYYENVALTPKGVWETISRHLFEIPPEFVDSKYFCVAARKRGYIHNLPINNRFQIQPPPKYTIHDAFPLSKRWWPEWDKRTKLNCILTCTGSAQLTNRIRVALEPYNEEPEPPKHVQRYVIDQCKKWNLVWVGKNKAAPLEPDEMESILGFPKNHTRGGGMSRTERFKSLGNSFQVDTVAYHLSVLKPIFPHGINVLSLFTGIGGGEVALHRLQIKMKLVVSVEISKVNRNILKDFWEQTNQTGELIEFSDIQHLTNDTIEGLMEKYGGFDLVIGGSPCNNLAGGNRVSRVGLEGDQSSLFFEYCRILEVVRARMRGS

SEQ ID NO: 619 - protein, 791 aa, Arabidopsis sp.
MAARNKQKKRAEPESDLCFAGKPMSVVESTIRWPHRYQSKKTKLQAPTKKPANKGGKKEDEEIIKQAKCHFDKALVDGVLINLNDDVYVTGLPGKLKFIAKVIELFEADDGVPYCRFRWYYRPEDTLIERFSHLVQPKRVFLSNDENDNPLTCIWSKVNIAKVPLPKITSRIEQRVIPPCDYYYDMKYEVPYLNFTSADDGSDASSSLSSDSALNCFENLHKDEKFLLDLYSGCGAMSTGFCMGASISGVKLITKWSVDINKFACDSLKLNHPETEVRNEAAEDFLALLKEWKRLCEKFSLVSSTEPVESISELEDEEVEENDDIDEASTGAELEPGEFEVEKFLGIMFGDPQGTGEKTLQLMVRWKGYNSSYDTWEPYSGLGNCKEKLKEYVIDGFKSHLLPLPGTVYTVCGGPPCQGISGYNRYRNNEAPLEDQKNQQLLVFLDIIDFLKPNYVLMENVVDLLRFSKGFLARHAVASFVAMNYQTRLGMMAAGSYGLPQLRNRVFLWAAQPSEKLPPYPLPTHEVAKKFNTPKEFKDLQVGRIQMEFLKLDNALTLADAISDLPPVTNYVANDVMDYNDAAPKTEFENFISLKRSETLLPAFGGDPTRRLFDHQPLVLGDDDLERVSYIPKQKGANYRDMPGVLVHNNKAEINPRFRAKLKSGKNVVPAYAISFIKGKSKKPFGRLWGDEIVNTVVTRAEPHNQCVIHPMQNRVLSVRENARLQGFPDCYKLCGTIKEKYIQVGNAVAVPVGVALGYAFGMASQGLTDDEPVIKLPFKYPECMQAKDQI

SEQ ID NO: 620 - protein, 1295 aa, Arabidopsis sp.
MLSPAKCESEEAQAPLDLHSSSRSEPECLSLVLWCPNPEEAAPSSTRELIKLPDNGEMSLRRSTTLNCNSPEENGGEGRVSQRKSSRGKSQPLLMLTNGCQLRRSPRFRALHANFDNVCSVPVTKGGVSQRKFSRGKSQPLLTLTNGCQLRRSPRFRAVDGNFDSVCSVPVTGKFGSRKRKSNSALDKKESSDSEGLTFKDIAVIAKSLEMEIISECQYKNNVAEGRSRLQDPAKRKVDSDTLLYSSINSSKQSLGSNKRMRRSQRFMKGTENEGEENLGKSKGKGMSLASCSFRRSTRLSGTVETGNTETLNRRKDCGPALCGAEQVRGTERLVQISKKDHCCEAMKKCEGDGLVSSKQELLVFPSGCIKKTVNGCRDRTLGKPRSSGLNTDDIHTSSLKISKNDTSNGLTMTTALVEQDAMESLLQGKTSACGAADKGKTREMHVNSTVIYLSDSDEPSSIEYLNGDNLTQVESGSALSSGGNEGIVSLDLNNPTKSTKRKGKRVTRTAVQEQNKRSICFFIGEPLSCEEAQERWRWRYELKERKSKSRGQQSEDDEDKIVANVECHYSQAKVDGHTFSLGDFAYIKGEEEETHVGQIVEFFKTTDGESYFRVQWFYRATDTIMERQATNHDKRRLFYSTVMNDNPVDCLISKVTVLQVSPRVGLKPNSIKSDYYFDMEYCVEYSTFQTLRNPKTSENKLECCADVVPTESTESILKKKSFSGELPVLDLYSGCGGMSTGLSLGAKISGVDVVTKWAVDQNTAACKSLKLNHPNTQVRNDAAGDFLQLLKEWDKLCKRYVFNNDQRTDTLRSVNSTKETSGSSSSSDDDSDSEEYEVEKLVDICFGDHDKTGKNGLKFKVHWKGYRSDEDTWELAEELSNCQDAIREFVTSGFKSKILPLPGRVGVICGGPPCQGISGYNRHRNVDSPLNDERNQQIIVFMDIVEYLKPSYVLMENVVDILRMDKGSLGRYALSRLVNMRYQARLGIMTAGCYGLSQFRSRVFMWGAVPNKNLPPFPLPTHDVIVRYGLPLEFERNVVAYAEGQPRKLEKALVLKDAISDLPHVSNDEDREKLPYESLPKTDFQRYIRSTKRDLTGSAIDNCNKRTMLLHDHRPFHINEDDYARVCQIPKRKGANFRDLPGLIVRNNTVCRDPSMEPVILPSGKPLVPGYVFTFQQGKSKRPFARLWWDETVPTVLTVPTCHSQALLHPEQDRVLTIRESARLQGFPDYFQFCGTIKERYCQIGNAVAVSVSRALGYSLGMAFRGLARDEHLIKLPQNFSHSTYPQLQETIPH

SEQ ID NO: 621 - protein, 839 aa, Arabidopsis sp.
MAPKRKRPATKDDTTKSIPKPKKRAPKRAKTVKEEPVTVVEEGEKHVARFLDEPIPESEAKSTWPDRYKPIEVQPPKASSRKKTKDDEKVEIIRARCHYRRAIVDERQIYELNDDAYVQSGEGKDPFICKIIEMFEGANGKLYFTARWFYRPSDTVMKEFEILIKKKRVFFSEIQDTNELGLLEKKLNILMIPLNENTKETIPATENCDFFCDMNYFLPYDTFEAIQQETMMAISESSTISSDTDIREGAAAISEIGECSQETEGHKKATLLDLYSGCGAMSTGLCMGAQLSGLNLVTKWAVDMNAHACKSLQHNHPETNVRNMTAEDFLFLLKEWEKLCIHFSLRNSPNSEEYANLHGLNNVEDNEDVSEESENEDDGEVFTVDKIVGISFGVPKKLLKRGLYLKVRWLNYDDSHDTWEPIEGLSNCRGKIEEFVKLGYKSGILPLPGGVDVVCGGPPCQGISGHNRFRNLLDPLEDQKNKQLLVYMNIVEYLKPKFVLMENVVDMLKMAKGYLARFAVGRLLQMNYQVRNGMMAAGAYGLAQFRLRFFLWGALPSEIIPQFPLPTHDLVHRGNIVKEFQGNIVAYDEGHTVKLADKLLLKDVISDLPAVANSEKRDEITYDKDPTTPFQKFIRLRKDEASGSQSKSKSKKHVLYDHHPLNLNINDYERVCQVPKRKGANFRDFPGVIVGPGNVVKLEEGKERVKLESGKTLVPDYALTYVDGKSCKPFGRLWWDEIVPTVVTRAEPHNQVIIHPEQNRVLSIRENARLQGFPDDYKLFGPPKQKYIQVGNAVAVPVAKALGYALGTAFQGLAVGKDPLLTLPEGFAFMKPTLPSELA

SEQ ID NO: 622 - protein, 142 aa, unidentified
  source 1..142: note = Neurospora
MAEQNPFVIDDEDDVIQIHDEEEVEEEVAEVIDITEDDIEPSELDRAFGSRPKEETLPSLLLRDQGFIVRPGMTVELKAPIGRFAISFVRVNSIVKVRQAHVNNVTIRGHGFTRAKEMNGMLPKQLNECCLVASIDTRDPRP

SEQ ID NO: 623 - protein, 529 aa, Escherichia coli
MNNNDLVAKLWKLCDNLRDGGVSYQNYVNELASLLFLKMCKETGQEAEYLPEGYRWDDLKSRIGQEQLQFYRKMLVHLGEDDKKLVQAVFHNVSTTITEPKQITALVSNMDSLDWYNGAHGKSRDDFGDMYEGLLQKNANETKSGAGQYFTPRPLIKTIIHLLKPQPREVVQDPAAGTAGFLIEADRYVKSQTNDLDDLDGDTQDFQIHRAFIGLELVPGTRRLALMNCLLHDIEGNLDHGGAIRLGNTLGSDGENLPKAHIVATNPPFGSAAGTNITRTFVHPTSNKQLCFMQHIIETLHPGGRAAVVVPDNVLFEGGKGTDIRRDLMDKCHLHTILRLPTGIFYAQGVKTNVLFFTKGTVANPNQDKNCTDDVWVYDLRTNMPSFGKRTPFTDEHLQPFERVYGEDPHGLSPRTEGEWSFNAEETEVADSEENKNTDQHLATSRWRKFSREWIRTAKSDSLDISWLKDKDSIDADSLPEPDVLAAEAMGELVQALSELDALMRELGASDEADLQRQLLEEAFGGVKE

SEQ ID NO: 624 - protein, 464 aa, Escherichia coli
MSAGKLPEGWVIAPVSTVTTLIRGVTYKKEQAINYLKDDYLPLIRANNIQNGKFDTTDLVFVPKNLVKESQKISPEDIVIAMSSGSKSVVGKSAHQHLPFECSFGAFCGVLRPEKLIFSGFIAHFTKSSLYRNKISSLSAGANINNIKPASFDLINIPIPPLAEQKIIAEKLDTLLAQVDSTKARFEQIPQILKRFRQAVLGGAVNGKLTEKWRNFEPQHSVFKKLNFESILTELRNGLSSKPNESGVGHPILRISSVRAGHVDQNDIRFLECSESELNRHKLQDGDLLFTRYNGSLEFVGVCGLLKKLQHQNLLYPDKLIRARLTKDALPEYIEIFFSSPSARNAMMNCVKTTSGQKGISGKDIKSQVVLLPPVKEQAEIVRRVEQLFAYADTIEKQVNNALARVNNLTQSILAKAFRGELTAQWRAENPDLISGENSAAALLEKIKAERAASGGKKASRKKS

SEQ ID NO: 625 - protein, 421 aa, Thermus aquaticus
MGLPPLLSLPSNSAPRSLGRVETPPEVVDFMVSLAEAPRGGRVLEPACAHGPFLRAFREAHGTAYRFVGVEIDPKALDLPPWAEGILADFLLWEPGEAFDLILGNPPYGIVGEASKYPIHVFKAVKDLYKKAFSTWKGKYNLYGAFLEKAVRLLKPGGVLVFVVPATWLVLEDFALLREFLAREGKTSVYYLGEVFPQKKVSAVVIRFQKSGKGLSLWDTQESESGFTPILWAEYPHWEGEIIRFETEETRKLEISGMPLGDLFHIRFAARSPEFKKHPAVRKEPGPGLVPVLTGRNLKPGWVDYEKNHSGLWMPKERAKELRDFYATPHLVVAHTKGTRVVAAWDERAYPWREEFHLLPKEGVRLDPSSLVQWLNSEAMQKHVRTLYRDFVPHLTLRMLERLPVRREYGFHTSPESARNF

SEQ ID NO: 626 - protein, 278 aa, Escherichia coli
MKKNRAFLKWAGGKYPLLDDIKRHLPKGECLVEPFVGAGSVFLNTDFSRYILADINSDLISLYNIVKMRTDEYVQAARELFVPETNCAEVYYQFREEFNKSQDPFRRAVLFLYLNRYGYNGLCRYNLRGEFNVPFGRYKKPYFPEAELYHFAEKAQNAFFYCESYADSMARADDASVVYCDPPYAPLSATANFTAYHTNSFTLEQQAHLAEIAEGLVERHIPVLISNHDTMLTREWYQRAKLHVVKVRRSISSNGGTRKKVDELLALYKPGVVSPAKK

SEQ ID NO: 627 - protein, 358 aa, unidentified
  source 1..358: note = Caulobacter crescentus
MKFGPETIIHGDCIEQMNALPEKSVDLIFADPPYNLQLGGDLLRPDNSKVDAVDDHWDQFESFAAYDKFTREWLKAARRVLKDDGAIWVIGSYHNIFRVGVAVQDLGFWILNDIVWRKSNPMPNFKGTRFANAHETLIWASKSQNAKRYTFNYDALKMANDEVQMRSDWTIPLCTGEERIKGADGQKAHPTQKPEALLYRVILSTTKPGDVILDPFFGVGTTGAAAKRLGRKFIGIEREAEYLEHAKARIAKVVPIAPEDLDVMGSKRAEPRVPFGTIVEAGLLSPGDTLYCSKGTHVAKVRPDGSITVGDLSGSIHKIGALVQSAPACNGWTYWHFKTDAGLAPIDVLRAQVRAGMN

SEQ ID NO: 628 - protein, 577 aa, unidentified
  source 1..577: note = Clostridioides difficile
MDDISQDNFLLSKEYENSLDVDTKKASGIYYTPKIIVDYIVKKTLKNHDIIKNPYPRILDISCGCGNFLLEVYDILYDLFEENIYELKKKYDENYWTVDNIHRHILNYCIYGADIDEKAISILKDSLTNKKVVNDLDESDIKINLFCCDSLKKKWRYKFDYIVGNPPYIGHKKLEKKYKKFLLEKYSEVYKDKADLYFCFYKKIIDILKQGGIGSVITPRYFLESLSGKDLREYIKSNVNVQEIVDFLGANIFKNIGVSSCILTFDKKKTKETYIDVFKIKNEDICINKFETLEELLKSSKFEHFNINQRLLSDEWILVNKDDETFYNKIQEKCKYSLEDIAISFQGIITGCDKAFILSKDDVKLNLVDDKFLKCWIKSKNINKYIVDKSEYRLIYSNDIDNENTNKRILDEIIGLYKTKLENRRECKSGIRKWYELQWGREKLFFERKKIMYPYKSNENRFAIDYDNNFSSADVYSFFIKEEYLDKFSYEYLVGILNSSVYDKYFKITAKKMSKNIYDYYPNKVMKIRIFRDNNYEEIENLSKQIISILLNKSIDKGKVEKLQIKMDNLIMDSLGI

SEQ ID NO: 629 - protein, 835 aa, synthetic construct
MAASAAAASAAAASAASGSPGPGEGSAGGEKRSTAPSAAASASASAAASSPAGGGAEALELLEHCGVCRERLRPEREPRLLPCLHSACSACLGPAAPAAANSSGDGGAAGDGTVVDCPVCKQQCFSKDIVENYFMRDSGSKAATDAQDANQCCTSCEDNAPATSYCVECSEPLCETCVEAHQRVKYTKDHTVRSTGPAKSRDGERTVYCNVHKHEPLVLFCESCDTLTCRDCQLNAHKDHQYQFLEDAVRNQRKLLASLVKRLGDKHATLQKSTKEVRSSIRQVSDVQKRVQVDVKMAILQIMKELNKRGRVLVNDAQKVTEGQQERLERQHWTMTKIQKHQEHILRFASWALESDNNTALLLSKKLIYFQLHRALKMIVDPVEPHGEMKFQWDLNAWTKSAEAFGKIVAERPGTNSTGPAPMAPPRAPGPLSKQGSGSSQPMEVQEGYGFGSGDDPYSSAEPHVSGVKRSRSGEGEVSGLMRKVPRVSLERLDLDLTADSQPPVFKVFPGSTTEDYNLIVIERGAAAAATGQPGTAPAGTPGAPPLAGMAIVKEEETEAAIGAPPTATEGPETKPVLMALAEGPGAEGPRLASPSGSTSSGLEVVAPEGTSAPGGGPGTLDDSATICRVCQKPGDLVMCNQCEFCFHLDCHLPALQDVPGEEWSCSLCHVLPDLKEEDGSLSLDGADSTGVVAKLSPANQRKCERVLLALFCHEPCRPLHQLATDSTFSLDQPGGTLDLTLIRARLQEKLSPPYSSPQEFAQDVGRMFKQFNKLTEDKADVQSIIGLQRFFETRMNEAFGDTKFSAVLVEPPPMSLPGAGLSSQELSGGPGDGP

SEQ ID NO: 630 - protein, 486 aa, synthetic construct
MVAGMLGLREEKSEDQDLQGLKDKPLKFKKVKKDKKEEKEGKHEPVQPSAHHSAEPAEAGKAETSEGSGSAPAVPEASASPKQRRSIIRDRGPMYDDPTLPEGWTRKLKQRKSGRSAGKYDVYLINPQGKAFRSKVELIAYFEKVGDTSLDPNDFDFTVTGRGSPSRREQKPPKKPKSPKAPGTGRGRGRPKGSGTTRPKAATSEGVQVKRVLEKSPGKLLVKMPFQTSPGGKAEGGGATTSTQVMVIKRPGRKRKAEADPQAIPKKRGRKPGSVVAAAAAEAKKKAVKESSIRSVQETVLPIKKRKTRETVSIEVKEVVKPLLVSTLGEKSGKGLKTCKSPGRKSKESSPKGRSSSASSPPKKEHHHHHHHSESPKAPVPLLPPLPPPPPEPESSEDPTSPPEPQDLSSSVCKEEKMPRGGSLESDGCPKEPAKTQPAVATAATAAEKYKHRGEGERKDIVSSSMPRPNREEPVDSRTPVTERVS

SEQ ID NO: 631 - protein, 4 aa, synthetic construct
SGGS

SEQ ID NO: 632 - protein, 24 aa, synthetic construct
SGGSSGSETPGTSESATPESSGGS

SEQ ID NO: 633 - protein, 32 aa, synthetic construct
SGGSSGGSSGSETPGTSESATPESSGGSSGGS

SEQ ID NO: 634 - protein, 104 aa, synthetic construct
GGSGGSPGSPAGSPTSTEEGTSESATPESGPGTSTEPSEGSAPGSPAGSPTSTEEGTSTEPSEGSAPGTSTEPSEGSAPGTSESATPESGPGSEPATSGGSGGS

SEQ ID NO: 635 - protein, 5 aa, synthetic construct
GSGGG

SEQ ID NO: 636 - protein, 20 aa, synthetic construct
GGGGSGGGGSGGGGSGGGGS

SEQ ID NO: 637 - protein, 27 aa, synthetic construct
SSGNSNANSRGPSFSSGLVPLSLRGSH

SEQ ID NO: 638 - protein, 16 aa, synthetic construct
SGSETPGTSESATPES

SEQ ID NO: 639 - protein, 24 aa, synthetic construct
SGGSSGGSSGSETPGTSESATPES

SEQ ID NO: 640 - protein, 40 aa, synthetic construct
SGGSSGGSSGSETPGTSESATPESSGGSSGGSSGGSSGGS

SEQ ID NO: 641 - protein, 64 aa, synthetic construct
SGGSSGGSSGSETPGTSESATPESSGGSSGGSSGGSSGGSSGSETPGTSESATPESSGGSSGGS

SEQ ID NO: 642 - protein, 92 aa, synthetic construct
PGSPAGSPTSTEEGTSESATPESGPGTSTEPSEGSAPGSPAGSPTSTEEGTSTEPSEGSAPGTSTEPSEGSAPGTSESATPESGPGSEPATS

SEQ ID NO: 643 - protein, 80 aa, synthetic construct
GGPSSGAPPPSGGSPAGSPTSTEEGTSESATPESGPGTSTEPSEGSAPGSPAGSPTSTEEGTSTEPSEGSAPGTSTEPSE

SEQ ID NO: 644 - protein, 7 aa, synthetic construct
PKKKRKV

SEQ ID NO: 645 - protein, 20 aa, synthetic construct
AVKRPAATKKAGQAKKKKLD

SEQ ID NO: 646 - protein, 25 aa, synthetic construct
MSRRRKANPTKLSENAKKLAKEVEN

SEQ ID NO: 647 - protein, 9 aa, synthetic construct
PAAKRVKLD

SEQ ID NO: 648 - protein, 9 aa, synthetic construct
KLKIKRPVK

SEQ ID NO: 649 - protein, 30 aa, synthetic construct
MDSLLMNRRKFLYQFKNVRWAKGRRETYLC

SEQ ID NO: 650 - protein, 665 aa, synthetic construct
  VARIANT 64..308: note = may be absent
  VARIANT 365..609: note = may be absent
  VARIANT 27..28: note = may be TR, LR or LK
  VARIANT 55..56: note = may be TR, LR or LK
  VARIANT 328..329: note = may be TR, LR or LK
  VARIANT 356..357: note = may be TR, LR or LK
  VARIANT 630..631: note = may be TR, LR or LK
  VARIANT 658..659: note = may be TR, LR or LK
SRPGERPFQCRICMRNFSXXXXXXXHXXTHTGEKPFQCRICMRNFSXXXXXXXHXXTHXXXXXXXXXXXXXXXXXXXXXXXXXXXXXXXXXXXXXXXXXXXXXXXXXXXXXXXXXXXXXXXXXXXXXXXXXXXXXXXXXXXXXXXXXXXXXXXXXXXXXXXXXXXXXXXXXXXXXXXXXXXXXXXXXXXXXXXXXXXXXXXXXXXXXXXXXXXXXXXXXXXXXXXXXXXXXXXXXXXXXXXXXXXXXXXXXXXXXXXXXXXXXXXXXXXXXXXXXXXXXXXXXXXXXXXXXXXXXXXXXXXXXXXXXXFQCRICMRNFSXXXXXXXHXXTHTGEKPFQCRICMRNFSXXXXXXXHXXTHXXXXXXXXXXXXXXXXXXXXXXXXXXXXXXXXXXXXXXXXXXXXXXXXXXXXXXXXXXXXXXXXXXXXXXXXXXXXXXXXXXXXXXXXXXXXXXXXXXXXXXXXXXXXXXXXXXXXXXXXXXXXXXXXXXXXXXXXXXXXXXXXXXXXXXXXXXXXXXXXXXXXXXXXXXXXXXXXXXXXXXXXXXXXXXXXXXXXXXXXXXXXXXXXXXXXXXXXXXXXXXXXXXXXXXXXXXXXXXXXXXXXXXXXXXPFQCRICMRNFSXXXXXXXHXXTHTGEKPFQCRICMRNFSXXXXXXXHXXTHLRGS

SEQ ID NO: 651 - protein, 6 aa, synthetic construct
TGSQKP

SEQ ID NO: 652 - protein, 9 aa, synthetic construct
TGGGGSQKP

SEQ ID NO: 653 - RNA, 93 nt, synthetic construct
  source 1..93: mol_type = other RNA
gtttaagagctatgctggaaacagcatagcaagtttaaataaggctagtccgttatcaacttgaaaaagtggcaccgagtcggtgcttttttt

SEQ ID NO: 654 - RNA, 80 nt, synthetic construct
  source 1..80: mol_type = other RNA
gttttagagctagaaatagcaagttaaaataaggctagtccgttatcaacttgaaaaagtggcaccgagtcggtgctttt

SEQ ID NO: 655 - RNA, 92 nt, synthetic construct
  source 1..92: mol_type = other RNA
gtttaagagctaagctggaaacagcatagcaagtttaaataaggctagtccgttatcaacttgaaaaagtggcaccgagtcggtgctttttt

SEQ ID NO: 656 - RNA, 93 nt, synthetic construct
  source 1..93: mol_type = other RNA
gtttaagagctaagctggaaacagcatagcaagtttaaataaggctagtccgttatcaacttgaaaaagtggcaccgagtcggtgcttttttt

SEQ ID NO: 657 - protein, 25 aa, synthetic construct
  VARIANT 4..5: note = may be absent
  VARIANT 23..24: note = may be absent
CXXXXCXXXXXXXXXXXXHXXXXXH

SEQ ID NO: 658 - protein, 2087 aa, synthetic construct
MNHDQEFDPPKVYPPVPAEKRKPIRVLSLFDGIATGLLVLKDLGIQVDRYIASEVCEDSITVGMVRHQGKIMYVGDVRSVTQKHIQEWGPFDLVIGGSPCNDLSIVNPARKGLYEGTGRLFFEFYRLLHDARPKEGDDRPFFWLFENVVAMGVSDKRDISRFLESNPVMIDAKEVSAAHRARYFWGNLPGMNRPLASTVNDKLELQECLEHGRIAKFSKVRTITTRSNSIKQGKDQHFPVFMNEKEDILWCTEMERVFGFPVHYTDVSNMSRLARQRLLGRSWSVPVIRHLFAPLKEYFACVSSGNSNANSRGPSFSSGLVPLSLRGSHMGPMEIYKTVSAWKRQPVRVLSLFRNIDKVLKSLGFLESGSGSGGGTLKYVEDVTNVVRRDVEKWGPFDLVYGSTQPLGSSCDRCPGWYMFQFHRILQYALPRQESQRPFFWIFMDNLLLTEDDQETTTRFLQTEAVTLQDVRGRDYQNAMRVWSNIPGLKSKHAPLTPKEEEYLQAQVRSRSKLDAPKVDLLVKNCLLPLREYFKYFSQNSLPLGGPSSGAPPPSGGSPAGSPTSTEEGTSESATPESGPGTSTEPSEGSAPGSPAGSPTSTEEGTSTEPSEGSAPGTSTEPSEPKKKRKVYMDKKYSIGLAIGTNSVGWAVITDEYKVPSKKFKVLGNTDRHSIKKNLIGALLFDSGETAEATRLKRTARRRYTRRKNRICYLQEIFSNEMAKVDDSFFHRLEESFLVEEDKKHERHPIFGNIVDEVAYHEKYPTIYHLRKKLVDSTDKADLRLIYLALAHMIKFRGHFLIEGDLNPDNSDVDKLFIQLVQTYNQLFEENPINASGVDAKAILSARLSKSRRLENLIAQLPGEKKNGLFGNLIALSLGLTPNFKSNFDLAEDAKLQLSKDTYDDDLDNLLAQIGDQYADLFLAAKNLSDAILLSDILRVNTEITKAPLSASMIKRYDEHHQDLTLLKALVRQQLPEKYKEIFFDQSKNGYAGYIDGGASQEEFYKFIKPILEKMDGTEELLVKLNREDLLRKQRTFDNGSIPHQIHLGELHAILRRQEDFYPFLKDNREKIEKILTFRIPYYVGPLARGNSRFAWMTRKSEETITPWNFEEVVDKGASAQSFIERMTNFDKNLPNEKVLPKHSLLYEYFTVYNELTKVKYVTEGMRKPAFLSGEQKKAIVDLLFKTNRKVTVKQLKEDYFKKIECFDSVEISGVEDRFNASLGTYHDLLKIIKDKDFLDNEENEDILEDIVLTLTLFEDREMIEERLKTYAHLFDDKVMKQLKRRRYTGWGRLSRKLINGIRDKQSGKTILDFLKSDGFANRNFMQLIHDDSLTFKEDIQKAQVSGQGDSLHEHIANLAGSPAIKKGILQTVKVVDELVKVMGRHKPENIVIEMARENQTTQKGQKNSRERMKRIEEGIKELGSQILKEHPVENTQLQNEKLYLYYLQNGRDMYVDQELDINRLSDYDVDAIVPQSFLKDDSIDNKVLTRSDKNRGKSDNVPSEEVVKKMKNYWRQLLNAKLITQRKFDNLTKAERGGLSELDKAGFIKRQLVETRQITKHVAQILDSRMNTKYDENDKLIREVKVITLKSKLVSDFRKDFQFYKVREINNYHHAHDAYLNAVVGTALIKKYPKLESEFVYGDYKVYDVRKMIAKSEQEIGKATAKYFFYSNIMNFFKTEITLANGEIRKRPLIETNGETGEIVWDKGRDFATVRKVLSMPQVNIVKKTEVQTGGFSKESILPKRNSDKLIARKKDWDPKKYGGFDSPTVAYSVLVVAKVEKGKSKKLKSVKELLGITIMERSSFEKNPIDFLEAKGYKEVKKDLIIKLPKYSLFELENGRKRMLASAGELQKGNELALPSKYVNFLYLASHYEKLKGSPEDNEQKQLFVEQHKHYLDEIIEQISEFSKRVILADANLDKVLSAYNKHRDKPIREQAENIIHLFTLTNLGAPAAFKYFDTTIDRKRYTSTKEVLDATLIHQSITGLYETRIDLSQLGGDPKKKRKVSGSETPGTSESATPESTGRTLVTFKDVFVDFTREEWKLLDTAQQIVYRNVMLENYKNLVSLGYQLTKPDVILRLEKGEEP

SEQ ID NO: 659 - protein, 1385 aa, synthetic construct
  VARIANT 696..940: note = may be absent
  VARIANT 998..1242: note = may be absent
  VARIANT 659..660: note = may be TR, LR or LK
  VARIANT 687..688: note = may be TR, LR or LK
  VARIANT 961..962: note = may be TR, LR or LK
  VARIANT 989..990: note = may be TR, LR or LK
  VARIANT 1263..1264: note = may be TR, LR or LK
  VARIANT 1291..1292: note = may be TR, LR or LK
MNHDQEFDPPKVYPPVPAEKRKPIRVLSLFDGIATGLLVLKDLGIQVDRYIASEVCEDSITVGMVRHQGKIMYVGDVRSVTQKHIQEWGPFDLVIGGSPCNDLSIVNPARKGLYEGTGRLFFEFYRLLHDARPKEGDDRPFFWLFENVVAMGVSDKRDISRFLESNPVMIDAKEVSAAHRARYFWGNLPGMNRPLASTVNDKLELQECLEHGRIAKFSKVRTITTRSNSIKQGKDQHFPVFMNEKEDILWCTEMERVFGFPVHYTDVSNMSRLARQRLLGRSWSVPVIRHLFAPLKEYFACVSSGNSNANSRGPSFSSGLVPLSLRGSHMGPMEIYKTVSAWKRQPVRVLSLFRNIDKVLKSLGFLESGSGSGGGTLKYVEDVTNVVRRDVEKWGPFDLVYGSTQPLGSSCDRCPGWYMFQFHRILQYALPRQESQRPFFWIFMDNLLLTEDDQETTTRFLQTEAVTLQDVRGRDYQNAMRVWSNIPGLKSKHAPLTPKEEEYLQAQVRSRSKLDAPKVDLLVKNCLLPLREYFKYFSQNSLPLGGPSSGAPPPSGGSPAGSPTSTEEGTSESATPESGPGTSTEPSEGSAPGSPAGSPTSTEEGTSTEPSEGSAPGTSTEPSEPKKKRKVYSRPGERPFQCRICMRNFSXXXXXXXHXXTHTGEKPFQCRICMRNFSXXXXXXXHXXTHXXXXXXXXXXXXXXXXXXXXXXXXXXXXXXXXXXXXXXXXXXXXXXXXXXXXXXXXXXXXXXXXXXXXXXXXXXXXXXXXXXXXXXXXXXXXXXXXXXXXXXXXXXXXXXXXXXXXXXXXXXXXXXXXXXXXXXXXXXXXXXXXXXXXXXXXXXXXXXXXXXXXXXXXXXXXXXXXXXXXXXXXXXXXXXXXXXXXXXXXXXXXXXXXXXXXXXXXXXXXXXXXXXXXXXXXXXXXXXXXXXXXXXXXXXPFQCRICMRNFSXXXXXXXHXXTHTGEKPFQCRICMRNFSXXXXXXXHXXTHXXXXXXXXXXXXXXXXXXXXXXXXXXXXXXXXXXXXXXXXXXXXXXXXXXXXXXXXXXXXXXXXXXXXXXXXXXXXXXXXXXXXXXXXXXXXXXXXXXXXXXXXXXXXXXXXXXXXXXXXXXXXXXXXXXXXXXXXXXXXXXXXXXXXXXXXXXXXXXXXXXXXXXXXXXXXXXXXXXXXXXXXXXXXXXXXXXXXXXXXXXXXXXXXXXXXXXXXXXXXXXXXXXXXXXXXXXXXXXXXXXXXXXXXXXPFQCRICMRNFSXXXXXXXHXXTHTGEKPFQCRICMRNFSXXXXXXXHXXTHLRGSPKKKRKVSGSETPGTSESATPESTGRTLVTFKDVFVDFTREEWKLLDTAQQIVYRNVMLENYKNLVSLGYQLTKPDVILRLEKGEEP

SEQ ID NO: 660 - protein, 2298 aa, synthetic construct
MGTMPKKKRKVPKKKRKVYNHDQEFDPPKVYPPVPAEKRKPIRVLSLFDGIATGLLVLKDLGIQVDRYIASEVCEDSITVGMVRHQGKIMYVGDVRSVTQKHIQEWGPFDLVIGGSPCNDLSIVNPARKGLYEGTGRLFFEFYRLLHDARPKEGDDRPFFWLFENVVAMGVSDKRDISRFLESNPVMIDAKEVSAAHRARYFWGNLPGMNRPLASTVNDKLELQECLEHGRIAKFSKVRTITTRSNSIKQGKDQHFPVFMNEKEDILWCTEMERVFGFPVHYTDVSNMSRLARQRLLGRSWSVPVIRHLFAPLKEYFACVSSGNSNANSRGPSFSSGLVPLSLRGSHMAAIPALDPEAEPSMDVILVGSSELSSSVSPGTGRDLIAYEVKANQRNIEDICICCGSLQVHTQHPLFEGGICAPCKDKFLDALFLYDDDGYQSYCSICCSGETLLICGNPDCTRCYCFECVDSLVGPGTSGKVHAMSNWVCYLCLPSSRSGLLQRRRKWRSQLKAFYDRESENPLEMFETVPVWRRQPVRVLSLFEDIKKELTSLGFLESGSDPGQLKHVVDVTDTVRKDVEEWGPFDLVYGATPPLGHTCDRPPSWYLFQFHRLLQYARPKPGSPRPFFWMFVDNLVLNKEDLDVASRFLEMEPVTIPDVHGGSLQNAVRVWSNIPAIRSRHWALVSEEELSLLAQNKQSSKLAAKWPTKLVKNCFLPLREYFKYFSTELTSSLGGPSSGAPPPSGGSPAGSPTSTEEGTSESATPESGPGTSTEPSEGSAPGSPAGSPTSTEEGTSTEPSEGSAPGTSTEPSELEDKKYSIGLAIGTNSVGWAVITDEYKVPSKKFKVLGNTDRHSIKKNLIGALLFDSGETAEATRLKRTARRRYTRRKNRICYLQEIFSNEMAKVDDSFFHRLEESFLVEEDKKHERHPIFGNIVDEVAYHEKYPTIYHLRKKLVDSTDKADLRLIYLALAHMIKFRGHFLIEGDLNPDNSDVDKLFIQLVQTYNQLFEENPINASGVDAKAILSARLSKSRRLENLIAQLPGEKKNGLFGNLIALSLGLTPNFKSNFDLAEDAKLQLSKDTYDDDLDNLLAQIGDQYADLFLAAKNLSDAILLSDILRVNTEITKAPLSASMIKRYDEHHQDLTLLKALVRQQLPEKYKEIFFDQSKNGYAGYIDGGASQEEFYKFIKPILEKMDGTEELLVKLNREDLLRKQRTFDNGSIPHQIHLGELHAILRRQEDFYPFLKDNREKIEKILTFRIPYYVGPLARGNSRFAWMTRKSEETITPWNFEEVVDKGASAQSFIERMTNFDKNLPNEKVLPKHSLLYEYFTVYNELTKVKYVTEGMRKPAFLSGEQKKAIVDLLFKTNRKVTVKQLKEDYFKKIECFDSVEISGVEDRFNASLGTYHDLLKIIKDKDFLDNEENEDILEDIVLTLTLFEDREMIEERLKTYAHLFDDKVMKQLKRRRYTGWGRLSRKLINGIRDKQSGKTILDFLKSDGFANRNFMQLIHDDSLTFKEDIQKAQVSGQGDSLHEHIANLAGSPAIKKGILQTVKVVDELVKVMGRHKPENIVIEMARENQTTQKGQKNSRERMKRIEEGIKELGSQILKEHPVENTQLQNEKLYLYYLQNGRDMYVDQELDINRLSDYDVDAIVPQSFLKDDSIDNKVLTRSDKNRGKSDNVPSEEVVKKMKNYWRQLLNAKLITQRKFDNLTKAERGGLSELDKAGFIKRQLVETRQITKHVAQILDSRMNTKYDENDKLIREVKVITLKSKLVSDFRKDFQFYKVREINNYHHAHDAYLNAVVGTALIKKYPKLESEFVYGDYKVYDVRKMIAKSEQEIGKATAKYFFYSNIMNFFKTEITLANGEIRKRPLIETNGETGEIVWDKGRDFATVRKVLSMPQVNIVKKTEVQTGGFSKESILPKRNSDKLIARKKDWDPKKYGGFDSPTVAYSVLVVAKVEKGKSKKLKSVKELLGITIMERSSFEKNPIDFLEAKGYKEVKKDLIIKLPKYSLFELENGRKRMLASAGELQKGNELALPSKYVNFLYLASHYEKLKGSPEDNEQKQLFVEQHKHYLDEIIEQISEFSKRVILADANLDKVLSAYNKHRDKPIREQAENIIHLFTLTNLGAPAAFKYFDTTIDRKRYTSTKEVLDATLIHQSITGLYETRIDLSQLGGDSPKKKRKVGVDGSSGSETPGTSESATPESRTLVTFKDVFVDFTREEWKLLDTAQQIVYRNVMLENYKNLVSLGYQLTKPDVILRLEKGEEPSADYKDDDDKAPKKKRKVPKKKRKV

SEQ ID NO: 661 - protein, 2318 aa, synthetic construct
MGTMPKKKRKVPKKKRKVYNHDQEFDPPKVYPPVPAEKRKPIRVLSLFDGIATGLLVLKDLGIQVDRYIASEVCEDSITVGMVRHQGKIMYVGDVRSVTQKHIQEWGPFDLVIGGSPCNDLSIVNPARKGLYEGTGRLFFEFYRLLHDARPKEGDDRPFFWLFENVVAMGVSDKRDISRFLESNPVMIDAKEVSAAHRARYFWGNLPGMNRPLASTVNDKLELQECLEHGRIAKFSKVRTITTRSNSIKQGKDQHFPVFMNEKEDILWCTEMERVFGFPVHYTDVSNMSRLARQRLLGRSWSVPVIRHLFAPLKEYFACVSSGNSNANSRGPSFSSGLVPLSLRGSHMAAIPALDPEAEPSMDVILVGSSELSSSVSPGTGRDLIAYEVKANQRNIEDICICCGSLQVHTQHPLFEGGICAPCKDKFLDALFLYDDDGYQSYCSICCSGETLLICGNPDCTRCYCFECVDSLVGPGTSGKVHAMSNWVCYLCLPSSRSGLLQRRRKWRSQLKAFYDRESENPLEMFETVPVWRRQPVRVLSLFEDIKKELTSLGFLESGSDPGQLKHVVDVTDTVRKDVEEWGPFDLVYGATPPLGHTCDRPPSWYLFQFHRLLQYARPKPGSPRPFFWMFVDNLVLNKEDLDVASRFLEMEPVTIPDVHGGSLQNAVRVWSNIPAIRSRHWALVSEEELSLLAQNKQSSKLAAKWPTKLVKNCFLPLREYFKYFSTELTSSLGGPSSGAPPPSGGSPAGSPTSTEEGTSESATPESGPGTSTEPSEGSAPGSPAGSPTSTEEGTSTEPSEGSAPGTSTEPSELEDKKYSIGLAIGTNSVGWAVITDEYKVPSKKFKVLGNTDRHSIKKNLIGALLFDSGETAEATRLKRTARRRYTRRKNRICYLQEIFSNEMAKVDDSFFHRLEESFLVEEDKKHERHPIFGNIVDEVAYHEKYPTIYHLRKKLVDSTDKADLRLIYLALAHMIKFRGHFLIEGDLNPDNSDVDKLFIQLVQTYNQLFEENPINASGVDAKAILSARLSKSRRLENLIAQLPGEKKNGLFGNLIALSLGLTPNFKSNFDLAEDAKLQLSKDTYDDDLDNLLAQIGDQYADLFLAAKNLSDAILLSDILRVNTEITKAPLSASMIKRYDEHHQDLTLLKALVRQQLPEKYKEIFFDQSKNGYAGYIDGGASQEEFYKFIKPILEKMDGTEELLVKLNREDLLRKQRTFDNGSIPHQIHLGELHAILRRQEDFYPFLKDNREKIEKILTFRIPYYVGPLARGNSRFAWMTRKSEETITPWNFEEVVDKGASAQSFIERMTNFDKNLPNEKVLPKHSLLYEYFTVYNELTKVKYVTEGMRKPAFLSGEQKKAIVDLLFKTNRKVTVKQLKEDYFKKIECFDSVEISGVEDRFNASLGTYHDLLKIIKDKDFLDNEENEDILEDIVLTLTLFEDREMIEERLKTYAHLFDDKVMKQLKRRRYTGWGRLSRKLINGIRDKQSGKTILDFLKSDGFANRNFMQLIHDDSLTFKEDIQKAQVSGQGDSLHEHIANLAGSPAIKKGILQTVKVVDELVKVMGRHKPENIVIEMARENQTTQKGQKNSRERMKRIEEGIKELGSQILKEHPVENTQLQNEKLYLYYLQNGRDMYVDQELDINRLSDYDVDAIVPQSFLKDDSIDNKVLTRSDKNRGKSDNVPSEEVVKKMKNYWRQLLNAKLITQRKFDNLTKAERGGLSELDKAGFIKRQLVETRQITKHVAQILDSRMNTKYDENDKLIREVKVITLKSKLVSDFRKDFQFYKVREINNYHHAHDAYLNAVVGTALIKKYPKLESEFVYGDYKVYDVRKMIAKSEQEIGKATAKYFFYSNIMNFFKTEITLANGEIRKRPLIETNGETGEIVWDKGRDFATVRKVLSMPQVNIVKKTEVQTGGFSKESILPKRNSDKLIARKKDWDPKKYGGFDSPTVAYSVLVVAKVEKGKSKKLKSVKELLGITIMERSSFEKNPIDFLEAKGYKEVKKDLIIKLPKYSLFELENGRKRMLASAGELQKGNELALPSKYVNFLYLASHYEKLKGSPEDNEQKQLFVEQHKHYLDEIIEQISEFSKRVILADANLDKVLSAYNKHRDKPIREQAENIIHLFTLTNLGAPAAFKYFDTTIDRKRYTSTKEVLDATLIHQSITGLYETRIDLSQLGGDSPKKKRKVGVDGSSGSETPGTSESATPESTGNKKLEAVGTGIEPKAMSQGLVTFGDVAVDFSQEEWEWLNPIQRNLYRKVMLENYRNLASLGLCVSKPDVISSLEQGKEPWSADYKDDDDKAPKKKRKVPKKKRKV

SEQ ID NO: 662 - protein, 2318 aa, synthetic construct
MGTMPKKKRKVPKKKRKVYNHDQEFDPPKVYPPVPAEKRKPIRVLSLFDGIATGLLVLKDLGIQVDRYIASEVCEDSITVGMVRHQGKIMYVGDVRSVTQKHIQEWGPFDLVIGGSPCNDLSIVNPARKGLYEGTGRLFFEFYRLLHDARPKEGDDRPFFWLFENVVAMGVSDKRDISRFLESNPVMIDAKEVSAAHRARYFWGNLPGMNRPLASTVNDKLELQECLEHGRIAKFSKVRTITTRSNSIKQGKDQHFPVFMNEKEDILWCTEMERVFGFPVHYTDVSNMSRLARQRLLGRSWSVPVIRHLFAPLKEYFACVSSGNSNANSRGPSFSSGLVPLSLRGSHMAAIPALDPEAEPSMDVILVGSSELSSSVSPGTGRDLIAYEVKANQRNIEDICICCGSLQVHTQHPLFEGGICAPCKDKFLDALFLYDDDGYQSYCSICCSGETLLICGNPDCTRCYCFECVDSLVGPGTSGKVHAMSNWVCYLCLPSSRSGLLQRRRKWRSQLKAFYDRESENPLEMFETVPVWRRQPVRVLSLFEDIKKELTSLGFLESGSDPGQLKHVVDVTDTVRKDVEEWGPFDLVYGATPPLGHTCDRPPSWYLFQFHRLLQYARPKPGSPRPFFWMFVDNLVLNKEDLDVASRFLEMEPVTIPDVHGGSLQNAVRVWSNIPAIRSRHWALVSEEELSLLAQNKQSSKLAAKWPTKLVKNCFLPLREYFKYFSTELTSSLGGPSSGAPPPSGGSPAGSPTSTEEGTSESATPESGPGTSTEPSEGSAPGSPAGSPTSTEEGTSTEPSEGSAPGTSTEPSELEDKKYSIGLAIGTNSVGWAVITDEYKVPSKKFKVLGNTDRHSIKKNLIGALLFDSGETAEATRLKRTARRRYTRRKNRICYLQEIFSNEMAKVDDSFFHRLEESFLVEEDKKHERHPIFGNIVDEVAYHEKYPTIYHLRKKLVDSTDKADLRLIYLALAHMIKFRGHFLIEGDLNPDNSDVDKLFIQLVQTYNQLFEENPINASGVDAKAILSARLSKSRRLENLIAQLPGEKKNGLFGNLIALSLGLTPNFKSNFDLAEDAKLQLSKDTYDDDLDNLLAQIGDQYADLFLAAKNLSDAILLSDILRVNTEITKAPLSASMIKRYDEHHQDLTLLKALVRQQLPEKYKEIFFDQSKNGYAGYIDGGASQEEFYKFIKPILEKMDGTEELLVKLNREDLLRKQRTFDNGSIPHQIHLGELHAILRRQEDFYPFLKDNREKIEKILTFRIPYYVGPLARGNSRFAWMTRKSEETITPWNFEEVVDKGASAQSFIERMTNFDKNLPNEKVLPKHSLLYEYFTVYNELTKVKYVTEGMRKPAFLSGEQKKAIVDLLFKTNRKVTVKQLKEDYFKKIECFDSVEISGVEDRFNASLGTYHDLLKIIKDKDFLDNEENEDILEDIVLTLTLFEDREMIEERLKTYAHLFDDKVMKQLKRRRYTGWGRLSRKLINGIRDKQSGKTILDFLKSDGFANRNFMQLIHDDSLTFKEDIQKAQVSGQGDSLHEHIANLAGSPAIKKGILQTVKVVDELVKVMGRHKPENIVIEMARENQTTQKGQKNSRERMKRIEEGIKELGSQILKEHPVENTQLQNEKLYLYYLQNGRDMYVDQELDINRLSDYDVDAIVPQSFLKDDSIDNKVLTRSDKNRGKSDNVPSEEVVKKMKNYWRQLLNAKLITQRKFDNLTKAERGGLSELDKAGFIKRQLVETRQITKHVAQILDSRMNTKYDENDKLIREVKVITLKSKLVSDFRKDFQFYKVREINNYHHAHDAYLNAVVGTALIKKYPKLESEFVYGDYKVYDVRKMIAKSEQEIGKATAKYFFYSNIMNFFKTEITLANGEIRKRPLIETNGETGEIVWDKGRDFATVRKVLSMPQVNIVKKTEVQTGGFSKESILPKRNSDKLIARKKDWDPKKYGGFDSPTVAYSVLVVAKVEKGKSKKLKSVKELLGITIMERSSFEKNPIDFLEAKGYKEVKKDLIIKLPKYSLFELENGRKRMLASAGELQKGNELALPSKYVNFLYLASHYEKLKGSPEDNEQKQLFVEQHKHYLDEIIEQISEFSKRVILADANLDKVLSAYNKHRDKPIREQAENIIHLFTLTNLGAPAAFKYFDTTIDRKRYTSTKEVLDATLIHQSITGLYETRIDLSQLGGDSPKKKRKVGVDGSSGSETPGTSESATPESTGDSVAFEDVAVNFTLEEWALLDPSQKNLYRDVMRETFRNLASVGKQWEDQNIEDPFKIPRRNISHIPERLCESKEGGQGEESADYKDDDDKAPKKKRKVPKKKRKV

SEQ ID NO: 663 - protein, 2338 aa, synthetic construct
MGTMPKKKRKVPKKKRKVYNHDQEFDPPKVYPPVPAEKRKPIRVLSLFDGIATGLLVLKDLGIQVDRYIASEVCEDSITVGMVRHQGKIMYVGDVRSVTQKHIQEWGPFDLVIGGSPCNDLSIVNPARKGLYEGTGRLFFEFYRLLHDARPKEGDDRPFFWLFENVVAMGVSDKRDISRFLESNPVMIDAKEVSAAHRARYFWGNLPGMNRPLASTVNDKLELQECLEHGRIAKFSKVRTITTRSNSIKQGKDQHFPVFMNEKEDILWCTEMERVFGFPVHYTDVSNMSRLARQRLLGRSWSVPVIRHLFAPLKEYFACVSSGNSNANSRGPSFSSGLVPLSLRGSHMAAIPALDPEAEPSMDVILVGSSELSSSVSPGTGRDLIAYEVKANQRNIEDICICCGSLQVHTQHPLFEGGICAPCKDKFLDALFLYDDDGYQSYCSICCSGETLLICGNPDCTRCYCFECVDSLVGPGTSGKVHAMSNWVCYLCLPSSRSGLLQRRRKWRSQLKAFYDRESENPLEMFETVPVWRRQPVRVLSLFEDIKKELTSLGFLESGSDPGQLKHVVDVTDTVRKDVEEWGPFDLVYGATPPLGHTCDRPPSWYLFQFHRLLQYARPKPGSPRPFFWMFVDNLVLNKEDLDVASRFLEMEPVTIPDVHGGSLQNAVRVWSNIPAIRSRHWALVSEEELSLLAQNKQSSKLAAKWPTKLVKNCFLPLREYFKYFSTELTSSLGGPSSGAPPPSGGSPAGSPTSTEEGTSESATPESGPGTSTEPSEGSAPGSPAGSPTSTEEGTSTEPSEGSAPGTSTEPSELEDKKYSIGLAIGTNSVGWAVITDEYKVPSKKFKVLGNTDRHSIKKNLIGALLFDSGETAEATRLKRTARRRYTRRKNRICYLQEIFSNEMAKVDDSFFHRLEESFLVEEDKKHERHPIFGNIVDEVAYHEKYPTIYHLRKKLVDSTDKADLRLIYLALAHMIKFRGHFLIEGDLNPDNSDVDKLFIQLVQTYNQLFEENPINASGVDAKAILSARLSKSRRLENLIAQLPGEKKNGLFGNLIALSLGLTPNFKSNFDLAEDAKLQLSKDTYDDDLDNLLAQIGDQYADLFLAAKNLSDAILLSDILRVNTEITKAPLSASMIKRYDEHHQDLTLLKALVRQQLPEKYKEIFFDQSKNGYAGYIDGGASQEEFYKFIKPILEKMDGTEELLVKLNREDLLRKQRTFDNGSIPHQIHLGELHAILRRQEDFYPFLKDNREKIEKILTFRIPYYVGPLARGNSRFAWMTRKSEETITPWNFEEVVDKGASAQSFIERMTNFDKNLPNEKVLPKHSLLYEYFTVYNELTKVKYVTEGMRKPAFLSGEQKKAIVDLLFKTNRKVTVKQLKEDYFKKIECFDSVEISGVEDRFNASLGTYHDLLKIIKDKDFLDNEENEDILEDIVLTLTLFEDREMIEERLKTYAHLFDDKVMKQLKRRRYTGWGRLSRKLINGIRDKQSGKTILDFLKSDGFANRNFMQLIHDDSLTFKEDIQKAQVSGQGDSLHEHIANLAGSPAIKKGILQTVKVVDELVKVMGRHKPENIVIEMARENQTTQKGQKNSRERMKRIEEGIKELGSQILKEHPVENTQLQNEKLYLYYLQNGRDMYVDQELDINRLSDYDVDAIVPQSFLKDDSIDNKVLTRSDKNRGKSDNVPSEEVVKKMKNYWRQLLNAKLITQRKFDNLTKAERGGLSELDKAGFIKRQLVETRQITKHVAQILDSRMNTKYDENDKLIREVKVITLKSKLVSDFRKDFQFYKVREINNYHHAHDAYLNAVVGTALIKKYPKLESEFVYGDYKVYDVRKMIAKSEQEIGKATAKYFFYSNIMNFFKTEITLANGEIRKRPLIETNGETGEIVWDKGRDFATVRKVLSMPQVNIVKKTEVQTGGFSKESILPKRNSDKLIARKKDWDPKKYGGFDSPTVAYSVLVVAKVEKGKSKKLKSVKELLGITIMERSSFEKNPIDFLEAKGYKEVKKDLIIKLPKYSLFELENGRKRMLASAGELQKGNELALPSKYVNFLYLASHYEKLKGSPEDNEQKQLFVEQHKHYLDEIIEQISEFSKRVILADANLDKVLSAYNKHRDKPIREQAENIIHLFTLTNLGAPAAFKYFDTTIDRKRYTSTKEVLDATLIHQSITGLYETRIDLSQLGGDSPKKKRKVGVDGSSGSETPGTSESATPESTGMNNSQGRVTFEDVTVNFTQGEWQRLNPEQRNLYRDVMLENYSNLVSVGQGETTKPDVILRLEQGKEPWLEEEEVLGSGRAEKNGDIGGQIWKPKDVKESLSADYKDDDDKAPKKKRKVPKKKRKV

SEQ ID NO: 664 - protein, 150 aa, synthetic construct
  VARIANT 6..150: note = Up to 29 copies of GGGGS may be absent
GGGGSGGGGSGGGGSGGGGSGGGGSGGGGSGGGGSGGGGSGGGGSGGGGSGGGGSGGGGSGGGGSGGGGSGGGGSGGGGSGGGGSGGGGSGGGGSGGGGSGGGGSGGGGSGGGGSGGGGSGGGGSGGGGSGGGGSGGGGSGGGGSGGGGS

SEQ ID NO: 665 - protein, 150 aa, synthetic construct
  VARIANT 6..150: note = Up to 29 copies of EAAAK may be absent
EAAAKEAAAKEAAAKEAAAKEAAAKEAAAKEAAAKEAAAKEAAAKEAAAKEAAAKEAAAKEAAAKEAAAKEAAAKEAAAKEAAAKEAAAKEAAAKEAAAKEAAAKEAAAKEAAAKEAAAKEAAAKEAAAKEAAAKEAAAKEAAAKEAAAK

SEQ ID NO: 666 - protein, 120 aa, synthetic construct
  VARIANT 5..120: note = Up to 29 copies of SGGS may be absent
SGGSSGGSSGGSSGGSSGGSSGGSSGGSSGGSSGGSSGGSSGGSSGGSSGGSSGGSSGGSSGGSSGGSSGGSSGGSSGGSSGGSSGGSSGGSSGGSSGGSSGGSSGGSSGGSSGGSSGGS

SEQ ID NO: 667 - DNA, 1503 bp, synthetic construct
  source 1..1503: mol_type = other DNA
atgagccgatccgtggcactggctgtcctggctctgctgtctctgagtggcctggaagcagtgatggcccctagaacactgttcctgggcggaggcggctccggaggaggagggtctggaggcgggggaagtatccagcggactcccaagattcaggtctacagcagacaccctgccgaaaacgggaaatccaacttcctgaattgctatgtgtcaggctttcatcccagcgacatcgaggtcgatctgctgaagaatggcgagcggattgaaaaagtggagcactctgacctgtcattcagcaaggattggagcttttacctgctgtactatactgagtttaccccaacagaaaaagacgagtatgcctgtagggtgaaccatgtcaccctgagtcagcccaagatcgtgaaatgggaccgcgatatgggtggaggaggctctgggggaggcggctccggaggcgggggaagtggcgggggaggatccggttctcactccttgaagtatttccacacttccgtgtcccggcccggccgcggggagccccgcttcatctctgtgggctacgtggacgacacccagttcgtgcgcttcgacaacgacgccgcgagtccgaggatggtgccgcgggcgccgtggatggagcaggaggggtcagagtattgggaccgggagacacggagcgccagggacaccgcacagattttccgagtgaatctgcggacgctgcgcggctactacaatcagagcgaggccgggtctcacaccctgcagtggatgcatggctgcgagctggggcccgacgggcgcttcctccgcgggtatgaacagttcgcctacgacggcaaggattatctcaccctgaatgaggacctgcgctcctggaccgcggtggacacggcggctcagatctccgagcaaaagtcaaatgatgcctctgaggcggagcaccagagagcctacctggaagacacatgcgtggagtggctccacaaatacctggagaaggggaaggagacgctgcttcacctggagcccccaaagacacacgtgactcaccaccccatctctgaccatgaggccaccctgaggtgctgggccctgggcttctaccctgcggagatcacactgacctggcagcaggatggggagggccatacccaggacacggagctcgtggagaccaggcctgcaggggatggaaccttccagaagtgggcagctgtggtggtgccttctggagaggagcagagatacacgtgccatgtgcagcatgaggggctacccgagcccgtcaccctgagatggaagccggcttcccagcccaccatccccatcgtgggcatcattgctggcctggttctccttggatctgtggtctctggagctgtggttgctgctgtgatatggaggaagaagagctcaggtggaaaaggagggagctactctaaggctgagtggagcgacagtgcccaggggtctgagtctcacagcttgtaa

SEQ ID NO: 668 - DNA, 1503 bp, synthetic construct
  source 1..1503: mol_type = other DNA
atgagccgatccgtggcactggctgtcctggctctgctgtctctgagtggcctggaagcagtgatggcccctagaacactgatcctgggcggaggcggctccggaggaggagggtctggaggcgggggaagtatccagcggactcccaagattcaggtctacagcagacaccctgccgaaaacgggaaatccaacttcctgaattgctatgtgtcaggctttcatcccagcgacatcgaggtcgatctgctgaagaatggcgagcggattgaaaaagtggagcactctgacctgtcattcagcaaggattggagcttttacctgctgtactatactgagtttaccccaacagaaaaagacgagtatgcctgtagggtgaaccatgtcaccctgagtcagcccaagatcgtgaaatgggaccgcgatatgggtggaggaggctctgggggaggcggctccggaggcgggggaagtggcgggggaggatccggttctcactccttgaagtatttccacacttccgtgtcccggcccggccgcggggagccccgcttcatctctgtgggctacgtggacgacacccagttcgtgcgcttcgacaacgacgccgcgagtccgaggatggtgccgcgggcgccgtggatggagcaggaggggtcagagtattgggaccgggagacacggagcgccagggacaccgcacagattttccgagtgaatctgcggacgctgcgcggctactacaatcagagcgaggccgggtctcacaccctgcagtggatgcatggctgcgagctggggcccgacgggcgcttcctccgcgggtatgaacagttcgcctacgacggcaaggattatctcaccctgaatgaggacctgcgctcctggaccgcggtggacacggcggctcagatctccgagcaaaagtcaaatgatgcctctgaggcggagcaccagagagcctacctggaagacacatgcgtggagtggctccacaaatacctggagaaggggaaggagacgctgcttcacctggagcccccaaagacacacgtgactcaccaccccatctctgaccatgaggccaccctgaggtgctgggccctgggcttctaccctgcggagatcacactgacctggcagcaggatggggagggccatacccaggacacggagctcgtggagaccaggcctgcaggggatggaaccttccagaagtgggcagctgtggtggtgccttctggagaggagcagagatacacgtgccatgtgcagcatgaggggctacccgagcccgtcaccctgagatggaagccggcttcccagcccaccatccccatcgtgggcatcattgctggcctggttctccttggatctgtggtctctggagctgtggttgctgctgtgatatggaggaagaagagctcaggtggaaaaggagggagctactctaaggctgagtggagcgacagtgcccaggggtctgagtctcacagcttgtaa

SEQ ID NO: 669 - DNA, 1503 bp, synthetic construct
  source 1..1503: mol_type = other DNA
atgagccgatccgtggcactggctgtcctggctctgctgtctctgagtggcctggaagcagtgatggcccctagaacactgctcctgggcggaggcggctccggaggaggagggtctggaggcgggggaagtatccagcggactcccaagattcaggtctacagcagacaccctgccgaaaacgggaaatccaacttcctgaattgctatgtgtcaggctttcatcccagcgacatcgaggtcgatctgctgaagaatggcgagcggattgaaaaagtggagcactctgacctgtcattcagcaaggattggagcttttacctgctgtactatactgagtttaccccaacagaaaaagacgagtatgcctgtagggtgaaccatgtcaccctgagtcagcccaagatcgtgaaatgggaccgcgatatgggtggaggaggctctgggggaggcggctccggaggcgggggaagtggcgggggaggatccggttctcactccttgaagtatttccacacttccgtgtcccggcccggccgcggggagccccgcttcatctctgtgggctacgtggacgacacccagttcgtgcgcttcgacaacgacgccgcgagtccgaggatggtgccgcgggcgccgtggatggagcaggaggggtcagagtattgggaccgggagacacggagcgccagggacaccgcacagattttccgagtgaatctgcggacgctgcgcggctactacaatcagagcgaggccgggtctcacaccctgcagtggatgcatggctgcgagctggggcccgacgggcgcttcctccgcgggtatgaacagttcgcctacgacggcaaggattatctcaccctgaatgaggacctgcgctcctggaccgcggtggacacggcggctcagatctccgagcaaaagtcaaatgatgcctctgaggcggagcaccagagagcctacctggaagacacatgcgtggagtggctccacaaatacctggagaaggggaaggagacgctgcttcacctggagcccccaaagacacacgtgactcaccaccccatctctgaccatgaggccaccctgaggtgctgggccctgggcttctaccctgcggagatcacactgacctggcagcaggatggggagggccatacccaggacacggagctcgtggagaccaggcctgcaggggatggaaccttccagaagtgggcagctgtggtggtgccttctggagaggagcagagatacacgtgccatgtgcagcatgaggggctacccgagcccgtcaccctgagatggaagccggcttcccagcccaccatccccatcgtgggcatcattgctggcctggttctccttggatctgtggtctctggagctgtggttgctgctgtgatatggaggaagaagagctcaggtggaaaaggagggagctactctaaggctgagtggagcgacagtgcccaggggtctgagtctcacagcttgtaa

SEQ ID NO: 670 - DNA, 1503 bp, synthetic construct
  source 1..1503: mol_type = other DNA
atgagccgatccgtggcactggctgtcctggctctgctgtctctgagtggcctggaagcagtgatggcccctagaacactggtgctgggcggaggcggctccggaggaggagggtctggaggcgggggaagtatccagcggactcccaagattcaggtctacagcagacaccctgccgaaaacgggaaatccaacttcctgaattgctatgtgtcaggctttcatcccagcgacatcgaggtcgatctgctgaagaatggcgagcggattgaaaaagtggagcactctgacctgtcattcagcaaggattggagcttttacctgctgtactatactgagtttaccccaacagaaaaagacgagtatgcctgtagggtgaaccatgtcaccctgagtcagcccaagatcgtgaaatgggaccgcgatatgggtggaggaggctctgggggaggcggctccggaggcgggggaagtggcgggggaggatccggttctcactccttgaagtatttccacacttccgtgtcccggcccggccgcggggagccccgcttcatctctgtgggctacgtggacgacacccagttcgtgcgcttcgacaacgacgccgcgagtccgaggatggtgccgcgggcgccgtggatggagcaggaggggtcagagtattgggaccgggagacacggagcgccagggacaccgcacagattttccgagtgaatctgcggacgctgcgcggctactacaatcagagcgaggccgggtctcacaccctgcagtggatgcatggctgcgagctggggcccgacgggcgcttcctccgcgggtatgaacagttcgcctacgacggcaaggattatctcaccctgaatgaggacctgcgctcctggaccgcggtggacacggcggctcagatctccgagcaaaagtcaaatgatgcctctgaggcggagcaccagagagcctacctggaagacacatgcgtggagtggctccacaaatacctggagaaggggaaggagacgctgcttcacctggagcccccaaagacacacgtgactcaccaccccatctctgaccatgaggccaccctgaggtgctgggccctgggcttctaccctgcggagatcacactgacctggcagcaggatggggagggccatacccaggacacggagctcgtggagaccaggcctgcaggggatggaaccttccagaagtgggcagctgtggtggtgccttctggagaggagcagagatacacgtgccatgtgcagcatgaggggctacccgagcccgtcaccctgagatggaagccggcttcccagcccaccatccccatcgtgggcatcattgctggcctggttctccttggatctgtggtctctggagctgtggttgctgctgtgatatggaggaagaagagctcaggtggaaaaggagggagctactctaaggctgagtggagcgacagtgcccaggggtctgagtctcacagcttgtaa

SEQ ID NO: 671 - DNA, 1503 bp, synthetic construct
  source 1..1503: mol_type = other DNA
atgagccgatccgtggcactggctgtcctggctctgctgtctctgagtggcctggaagcagtgatggcccctagaacagtgctgctgggcggaggcggctccggaggaggagggtctggaggcgggggaagtatccagcggactcccaagattcaggtctacagcagacaccctgccgaaaacgggaaatccaacttcctgaattgctatgtgtcaggctttcatcccagcgacatcgaggtcgatctgctgaagaatggcgagcggattgaaaaagtggagcactctgacctgtcattcagcaaggattggagcttttacctgctgtactatactgagtttaccccaacagaaaaagacgagtatgcctgtagggtgaaccatgtcaccctgagtcagcccaagatcgtgaaatgggaccgcgatatgggtggaggaggctctgggggaggcggctccggaggcgggggaagtggcgggggaggatccggttctcactccttgaagtatttccacacttccgtgtcccggcccggccgcggggagccccgcttcatctctgtgggctacgtggacgacacccagttcgtgcgcttcgacaacgacgccgcgagtccgaggatggtgccgcgggcgccgtggatggagcaggaggggtcagagtattgggaccgggagacacggagcgccagggacaccgcacagattttccgagtgaatctgcggacgctgcgcggctactacaatcagagcgaggccgggtctcacaccctgcagtggatgcatggctgcgagctggggcccgacgggcgcttcctccgcgggtatgaacagttcgcctacgacggcaaggattatctcaccctgaatgaggacctgcgctcctggaccgcggtggacacggcggctcagatctccgagcaaaagtcaaatgatgcctctgaggcggagcaccagagagcctacctggaagacacatgcgtggagtggctccacaaatacctggagaaggggaaggagacgctgcttcacctggagcccccaaagacacacgtgactcaccaccccatctctgaccatgaggccaccctgaggtgctgggccctgggcttctaccctgcggagatcacactgacctggcagcaggatggggagggccatacccaggacacggagctcgtggagaccaggcctgcaggggatggaaccttccagaagtgggcagctgtggtggtgccttctggagaggagcagagatacacgtgccatgtgcagcatgaggggctacccgagcccgtcaccctgagatggaagccggcttcccagcccaccatccccatcgtgggcatcattgctggcctggttctccttggatctgtggtctctggagctgtggttgctgctgtgatatggaggaagaagagctcaggtggaaaaggagggagctactctaaggctgagtggagcgacagtgcccaggggtctgagtctcacagcttgtaa

SEQ ID NO: 672 - DNA, 1503 bp, synthetic construct
  source 1..1503: mol_type = other DNA
atgagccgatccgtggcactggctgtcctggctctgctgtctctgagtggcctggaagcagtgatgccccctagaacactgctgctgggcggaggcggctccggaggaggagggtctggaggcgggggaagtatccagcggactcccaagattcaggtctacagcagacaccctgccgaaaacgggaaatccaacttcctgaattgctatgtgtcaggctttcatcccagcgacatcgaggtcgatctgctgaagaatggcgagcggattgaaaaagtggagcactctgacctgtcattcagcaaggattggagcttttacctgctgtactatactgagtttaccccaacagaaaaagacgagtatgcctgtagggtgaaccatgtcaccctgagtcagcccaagatcgtgaaatgggaccgcgatatgggtggaggaggctctgggggaggcggctccggaggcgggggaagtggcgggggaggatccggttctcactccttgaagtatttccacacttccgtgtcccggcccggccgcggggagccccgcttcatctctgtgggctacgtggacgacacccagttcgtgcgcttcgacaacgacgccgcgagtccgaggatggtgccgcgggcgccgtggatggagcaggaggggtcagagtattgggaccgggagacacggagcgccagggacaccgcacagattttccgagtgaatctgcggacgctgcgcggctactacaatcagagcgaggccgggtctcacaccctgcagtggatgcatggctgcgagctggggcccgacgggcgcttcctccgcgggtatgaacagttcgcctacgacggcaaggattatctcaccctgaatgaggacctgcgctcctggaccgcggtggacacggcggctcagatctccgagcaaaagtcaaatgatgcctctgaggcggagcaccagagagcctacctggaagacacatgcgtggagtggctccacaaatacctggagaaggggaaggagacgctgcttcacctggagcccccaaagacacacgtgactcaccaccccatctctgaccatgaggccaccctgaggtgctgggccctgggcttctaccctgcggagatcacactgacctggcagcaggatggggagggccatacccaggacacggagctcgtggagaccaggcctgcaggggatggaaccttccagaagtgggcagctgtggtggtgccttctggagaggagcagagatacacgtgccatgtgcagcatgaggggctacccgagcccgtcaccctgagatggaagccggcttcccagcccaccatccccatcgtgggcatcattgctggcctggttctccttggatctgtggtctctggagctgtggttgctgctgtgatatggaggaagaagagctcaggtggaaaaggagggagctactctaaggctgagtggagcgacagtgcccaggggtctgagtctcacagcttgtaa

SEQ ID NO: 673 - protein, 5 aa, synthetic construct
EAAAK

SEQ ID NO: 674 - protein, 9 aa, synthetic construct
VMAPRTLIL

SEQ ID NO: 675 - protein, 9 aa, synthetic construct
VMAPRTLLL

SEQ ID NO: 676 - protein, 9 aa, synthetic construct
VMAPRTLVL

SEQ ID NO: 677 - protein, 9 aa, synthetic construct
VMAPRTVLL

SEQ ID NO: 678 - protein, 9 aa, synthetic construct
VMAPRTLFL

SEQ ID NO: 679 - RNA, 20 nt, synthetic construct
  source 1..20: mol_type = other RNA
cggctctgcttcccttagac

SEQ ID NO: 680 - RNA, 20 nt, synthetic construct
  source 1..20: mol_type = other RNA
tctccttggtggcccgccgt

SEQ ID NO: 681 - RNA, 20 nt, synthetic construct
  source 1..20: mol_type = other RNA
ctcattctaggacttcaggc

SEQ ID NO: 682 - RNA, 20 nt, synthetic construct
  source 1..20: mol_type = other RNA
gggcacgcgtttaatataag

SEQ ID NO: 683 - RNA, 20 nt, synthetic construct
  source 1..20: mol_type = other RNA
cgcagcagacaggcttaccc

SEQ ID NO: 684 - RNA, 20 nt, synthetic construct
  source 1..20: mol_type = other RNA
cgcgcgctacttgccccttt

SEQ ID NO: 685 - RNA, 20 nt, synthetic construct
  source 1..20: mol_type = other RNA
ccgtggggctagtccagggc

SEQ ID NO: 686 - RNA, 20 nt, synthetic construct
  source 1..20: mol_type = other RNA
tcccttagactggagagctg

SEQ ID NO: 687 - RNA, 20 nt, synthetic construct
  source 1..20: mol_type = other RNA
gagggtcgggacaaagttta

SEQ ID NO: 688 - RNA, 20 nt, synthetic construct
  source 1..20: mol_type = other RNA
gtccacagctctccagtcta

SEQ ID NO: 689 - RNA, 20 nt, synthetic construct
  source 1..20: mol_type = other RNA
ggagggtcgggacaaagttt

SEQ ID NO: 690 - RNA, 20 nt, synthetic construct
  source 1..20: mol_type = other RNA
gcagtgccaggttagagaga

SEQ ID NO: 691 - RNA, 20 nt, synthetic construct
  source 1..20: mol_type = other RNA
ggccacggagcgagacatct

SEQ ID NO: 692 - RNA, 20 nt, synthetic construct
  source 1..20: mol_type = other RNA
gaagcagagccgcagcagac

SEQ ID NO: 693 - RNA, 20 nt, synthetic construct
  source 1..20: mol_type = other RNA
tccacagctctccagtctaa

SEQ ID NO: 694 - RNA, 20 nt, synthetic construct
  source 1..20: mol_type = other RNA
tcctgaagctgacagcattc

SEQ ID NO: 695 - RNA, 20 nt, synthetic construct
  source 1..20: mol_type = other RNA
gacgggtaggctcgtcccaa

SEQ ID NO: 696 - RNA, 20 nt, synthetic construct
  source 1..20: mol_type = other RNA
agggtaggagagactcacgc

SEQ ID NO: 697 - RNA, 20 nt, synthetic construct
  source 1..20: mol_type = other RNA
ggggcaagtagcgcgcgtcc

SEQ ID NO: 698 - RNA, 20 nt, synthetic construct
  source 1..20: mol_type = other RNA
tcccccagcgcagctggagt

SEQ ID NO: 699 - RNA, 20 nt, synthetic construct
  source 1..20: mol_type = other RNA
ctatgtggggccacaccgtg

SEQ ID NO: 700 - DNA, 18 bp, synthetic construct
  source 1..18: mol_type = other DNA
gcatctctggggccagtc

SEQ ID NO: 701 - DNA, 19 bp, synthetic construct
  source 1..19: mol_type = other DNA
ctggggccagtctgcaaag

SEQ ID NO: 702 - DNA, 19 bp, synthetic construct
  source 1..19: mol_type = other DNA
gcaaagcgagggggcagcc

SEQ ID NO: 703 - DNA, 18 bp, synthetic construct
  source 1..18: mol_type = other DNA
tcggagggcgccgatgta

SEQ ID NO: 704 - DNA, 19 bp, synthetic construct
  source 1..19: mol_type = other DNA
gatgtttaagaaggcatgc

SEQ ID NO: 705 - DNA, 19 bp, synthetic construct
  source 1..19: mol_type = other DNA
gtctcgtgatgtttaagaa

SEQ ID NO: 706 - DNA, 19 bp, synthetic construct
  source 1..19: mol_type = other DNA
ggaaactgaaaacgggaaa

SEQ ID NO: 707 - DNA, 19 bp, synthetic construct
  source 1..19: mol_type = other DNA
ggttagagagagggacttt

SEQ ID NO: 708 - DNA, 19 bp, synthetic construct
  source 1..19: mol_type = other DNA
gtggaggcgtcgcgctggc

SEQ ID NO: 709 - DNA, 20 bp, synthetic construct
  source 1..20: mol_type = other DNA
taggagagactcacgctgga

SEQ ID NO: 710 - DNA, 20 bp, synthetic construct
  source 1..20: mol_type = other DNA
gaggaaggaccagagcggga

SEQ ID NO: 711 - DNA, 19 bp, synthetic construct
  source 1..19: mol_type = other DNA
gcgggagaggaaggaccag

SEQ ID NO: 712 - DNA, 19 bp, synthetic construct
  source 1..19: mol_type = other DNA
gtcacggagcgagagagca

SEQ ID NO: 713 - DNA, 19 bp, synthetic construct
  source 1..19: mol_type = other DNA
ttggagaagggaagtcacg

SEQ ID NO: 714 - DNA, 19 bp, synthetic construct
  source 1..19: mol_type = other DNA
ggggaagcggcggggtggc

SEQ ID NO: 715 - DNA, 18 bp, synthetic construct
  source 1..18: mol_type = other DNA
gggtgcgcacccgggacg

SEQ ID NO: 716 - DNA, 20 bp, synthetic construct
  source 1..20: mol_type = other DNA
gccgaaaggggcaagtagcg

SEQ ID NO: 717 - DNA, 18 bp, synthetic construct
  source 1..18: mol_type = other DNA
gtcgccgtaggccaaagg

SEQ ID NO: 718 - DNA, 18 bp, synthetic construct
  source 1..18: mol_type = other DNA
ggcgacgggagggtcggg

SEQ ID NO: 719 - DNA, 19 bp, synthetic construct
  source 1..19: mol_type = other DNA
ggcgacgggagggtcggga

SEQ ID NO: 720 - DNA, 19 bp, synthetic construct
  source 1..19: mol_type = other DNA
tcagagcgccgaggttggg

SEQ ID NO: 721 - DNA, 18 bp, synthetic construct
  source 1..18: mol_type = other DNA
agcgccgaggttggggga

SEQ ID NO: 722 - DNA, 19 bp, synthetic construct
  source 1..19: mol_type = other DNA
agcgccgaggttgggggag

SEQ ID NO: 723 - DNA, 19 bp, synthetic construct
  source 1..19: mol_type = other DNA
gctgggggagccagaggcc

SEQ ID NO: 724 - DNA, 19 bp, synthetic construct
  source 1..19: mol_type = other DNA
gcagctggagtgggggacg

SEQ ID NO: 725 - DNA, 18 bp, synthetic construct
  source 1..18: mol_type = other DNA
gctggagtgggggacggg

SEQ ID NO: 726 - DNA, 19 bp, synthetic construct
  source 1..19: mol_type = other DNA
ggagtgggggacgggtagg

SEQ ID NO: 727 - DNA, 18 bp, synthetic construct
  source 1..18: mol_type = other DNA
gagtgggggacgggtagg

SEQ ID NO: 728 - DNA, 19 bp, synthetic construct
  source 1..19: mol_type = other DNA
gagtgggggacgggtaggc

SEQ ID NO: 729 - DNA, 18 bp, synthetic construct
  source 1..18: mol_type = other DNA
gtgggggacgggtaggct

SEQ ID NO: 730 - DNA, 19 bp, synthetic construct
  source 1..19: mol_type = other DNA
gaggtttgtgaacgcgtgg

SEQ ID NO: 731 - DNA, 19 bp, synthetic construct
  source 1..19: mol_type = other DNA
tgtgaacgcgtggaggggc

SEQ ID NO: 732 - DNA, 18 bp, synthetic construct
  source 1..18: mol_type = other DNA
gtgaacgcgtggaggggc

SEQ ID NO: 733 - DNA, 19 bp, synthetic construct
  source 1..19: mol_type = other DNA
gtgaacgcgtggaggggcg

SEQ ID NO: 734 - DNA, 19 bp, synthetic construct
  source 1..19: mol_type = other DNA
gtcgcccgggtaagcctgt

SEQ ID NO: 735 - DNA, 20 bp, synthetic construct
  source 1..20: mol_type = other DNA
taagcctgtctgctgcggct

SEQ ID NO: 736 - DNA, 19 bp, synthetic construct
  source 1..19: mol_type = other DNA
gaacttagcgggcgcctag

SEQ ID NO: 737 - DNA, 20 bp, synthetic construct
  source 1..20: mol_type = other DNA
gaggtgctaggacatgcgaa

SEQ ID NO: 738 - DNA, 19 bp, synthetic construct
  source 1..19: mol_type = other DNA
agtgacatgtgatgggaac

SEQ ID NO: 739 - DNA, 18 bp, synthetic construct
  source 1..18: mol_type = other DNA
gattgaagtcaagcctaa

SEQ ID NO: 740 - DNA, 19 bp, synthetic construct
  source 1..19: mol_type = other DNA
agtcaagcctaaccagggc

SEQ ID NO: 741 - DNA, 18 bp, synthetic construct
  source 1..18: mol_type = other DNA
gaaaatgacaggtgggcc

SEQ ID NO: 742 - DNA, 18 bp, synthetic construct
  source 1..18: mol_type = other DNA
ttggtgtgggagtaggca

SEQ ID NO: 743 - DNA, 18 bp, synthetic construct
  source 1..18: mol_type = other DNA
gggtgttcagaaacagaa

SEQ ID NO: 744 - DNA, 18 bp, synthetic construct
  source 1..18: mol_type = other DNA
ggggaagctgagggcacg

SEQ ID NO: 745 - DNA, 18 bp, synthetic construct
  source 1..18: mol_type = other DNA
ggtcaggggacgggggaa

SEQ ID NO: 746 - DNA, 18 bp, synthetic construct
  source 1..18: mol_type = other DNA
ggctgggaagggtgtgcc

SEQ ID NO: 747 - DNA, 18 bp, synthetic construct
  source 1..18: mol_type = other DNA
gccggtgtggttgggtgc

SEQ ID NO: 748 - DNA, 18 bp, synthetic construct
  source 1..18: mol_type = other DNA
taagttgctacgggaaag

SEQ ID NO: 749 - DNA, 18 bp, synthetic construct
  source 1..18: mol_type = other DNA
gttggagggggagaagtc

SEQ ID NO: 750 - DNA, 18 bp, synthetic construct
  source 1..18: mol_type = other DNA
gaggacccagcaggaatc

SEQ ID NO: 751 - DNA, 18 bp, synthetic construct
  source 1..18: mol_type = other DNA
gacaggtaggacccagca

SEQ ID NO: 752 - DNA, 18 bp, synthetic construct
  source 1..18: mol_type = other DNA
ctggaatggcaggaccag

SEQ ID NO: 753 - DNA, 18 bp, synthetic construct
  source 1..18: mol_type = other DNA
ggagtggagtctggcaga

SEQ ID NO: 754 - DNA, 18 bp, synthetic construct
  source 1..18: mol_type = other DNA
gccaacggtgtagctgcc

SEQ ID NO: 755 - DNA, 18 bp, synthetic construct
  source 1..18: mol_type = other DNA
ggagtctgagaaaaggga

SEQ ID NO: 756 - DNA, 18 bp, synthetic construct
  source 1..18: mol_type = other DNA
gcatgagactttgaggtg

SEQ ID NO: 757 - DNA, 19 bp, synthetic construct
  source 1..19: mol_type = other DNA
gatactgttgactgtagaa

SEQ ID NO: 758 - DNA, 19 bp, synthetic construct
  source 1..19: mol_type = other DNA
gactgtagaaggctctgag

SEQ ID NO: 759 - DNA, 19 bp, synthetic construct
  source 1..19: mol_type = other DNA
gcaatttggtgtgggagta

SEQ ID NO: 760 - DNA, 19 bp, synthetic construct
  source 1..19: mol_type = other DNA
gaagtccccagcagaggct

SEQ ID NO: 761 - DNA, 19 bp, synthetic construct
  source 1..19: mol_type = other DNA
gaggcatctgggcggaggg

SEQ ID NO: 762 - DNA, 19 bp, synthetic construct
  source 1..19: mol_type = other DNA
tggggaagctgagggcacg

SEQ ID NO: 763 - DNA, 19 bp, synthetic construct
  source 1..19: mol_type = other DNA
gctgagggcacgaggaggg

SEQ ID NO: 764 - DNA, 19 bp, synthetic construct
  source 1..19: mol_type = other DNA
agggcacgaggaggggctg

SEQ ID NO: 765 - DNA, 19 bp, synthetic construct
  source 1..19: mol_type = other DNA
ggagctgctgcctggctgg

SEQ ID NO: 766 - DNA, 19 bp, synthetic construct
  source 1..19: mol_type = other DNA
tggggatgggggtgaggat

SEQ ID NO: 767 - DNA, 19 bp, synthetic construct
  source 1..19: mol_type = other DNA
tgggggtgaggatgggaac

SEQ ID NO: 768 - DNA, 19 bp, synthetic construct
  source 1..19: mol_type = other DNA
gaggatgggaacaggagtc

SEQ ID NO: 769 - DNA, 19 bp, synthetic construct
  source 1..19: mol_type = other DNA
gcagctggggagagctggc

SEQ ID NO: 770 - DNA, 19 bp, synthetic construct
  source 1..19: mol_type = other DNA
gctggggagagctggcgga

SEQ ID NO: 771 - DNA, 19 bp, synthetic construct
  source 1..19: mol_type = other DNA
ggggagagctggcggatgc

SEQ ID NO: 772 - DNA, 19 bp, synthetic construct
  source 1..19: mol_type = other DNA
gacgggggaacagatggtg

SEQ ID NO: 773 - DNA, 19 bp, synthetic construct
  source 1..19: mol_type = other DNA
gaacagatggtgggaagag

SEQ ID NO: 774 - DNA, 19 bp, synthetic construct
  source 1..19: mol_type = other DNA
gttggctgggaagggtgtg

SEQ ID NO: 775 - DNA, 19 bp, synthetic construct
  source 1..19: mol_type = other DNA
taggaactggaattgagct

SEQ ID NO: 776 - DNA, 19 bp, synthetic construct
  source 1..19: mol_type = other DNA
gatggttaaaggggtggta

SEQ ID NO: 777 - DNA, 19 bp, synthetic construct
  source 1..19: mol_type = other DNA
ggtgtggttgggtgcagcc

SEQ ID NO: 778 - DNA, 19 bp, synthetic construct
  source 1..19: mol_type = other DNA
gcagccttaagttgctacg

SEQ ID NO: 779 - DNA, 19 bp, synthetic construct
  source 1..19: mol_type = other DNA
gctacgggaaagtgttgga

SEQ ID NO: 780 - DNA, 19 bp, synthetic construct
  source 1..19: mol_type = other DNA
ggagggggagaagtcagag

SEQ ID NO: 781 - DNA, 19 bp, synthetic construct
  source 1..19: mol_type = other DNA
gggggagaagtcagaggta

SEQ ID NO: 782 - DNA, 19 bp, synthetic construct
  source 1..19: mol_type = other DNA
ggaggacccagcaggaatc

SEQ ID NO: 783 - DNA, 19 bp, synthetic construct
  source 1..19: mol_type = other DNA
gtggtatcaaggaggaagt

SEQ ID NO: 784 - DNA, 19 bp, synthetic construct
  source 1..19: mol_type = other DNA
gtagtcagatggtttgggg

SEQ ID NO: 785 - DNA, 19 bp, synthetic construct
  source 1..19: mol_type = other DNA
gagagcctctgctggggac

SEQ ID NO: 786 - DNA, 19 bp, synthetic construct
  source 1..19: mol_type = other DNA
acagaaagtctgttggggg

SEQ ID NO: 787 - DNA, 19 bp, synthetic construct
  source 1..19: mol_type = other DNA
gaatttggtgaagacagaa

SEQ ID NO: 788 - DNA, 19 bp, synthetic construct
  source 1..19: mol_type = other DNA
gtggactgaatttggtgaa

SEQ ID NO: 789 - DNA, 19 bp, synthetic construct
  source 1..19: mol_type = other DNA
gcaacgcattgtgtaggaa

SEQ ID NO: 790 - DNA, 19 bp, synthetic construct
  source 1..19: mol_type = other DNA
taggacccagcagggcgtg

SEQ ID NO: 791 - DNA, 19 bp, synthetic construct
  source 1..19: mol_type = other DNA
gacaggtaggacccagcag

SEQ ID NO: 792 - DNA, 19 bp, synthetic construct
  source 1..19: mol_type = other DNA
tgggtatggagtggagtct

SEQ ID NO: 793 - DNA, 19 bp, synthetic construct
  source 1..19: mol_type = other DNA
ggggagggcagcatccgcc

SEQ ID NO: 794 - DNA, 20 bp, synthetic construct
  source 1..20: mol_type = other DNA
gttgactgtagaaggctctg

SEQ ID NO: 795 - DNA, 19 bp, synthetic construct
  source 1..19: mol_type = other DNA
gaggctgtgtgcttctgag

SEQ ID NO: 796 - DNA, 19 bp, synthetic construct
  source 1..19: mol_type = other DNA
agagcagtaaggggcaaac

SEQ ID NO: 797 - DNA, 18 bp, synthetic construct
  source 1..18: mol_type = other DNA
aggggcttagaatgaggc

SEQ ID NO: 798 - DNA, 19 bp, synthetic construct
  source 1..19: mol_type = other DNA
aggggcttagaatgaggcc

SEQ ID NO: 799 - DNA, 19 bp, synthetic construct
  source 1..19: mol_type = other DNA
gaacacctgcgtctaagcc

SEQ ID NO: 800 - DNA, 19 bp, synthetic construct
  source 1..19: mol_type = other DNA
gaggcctgggacaggagct

SEQ ID NO: 801 - DNA, 19 bp, synthetic construct
  source 1..19: mol_type = other DNA
gagggttttggtggcaatg

SEQ ID NO: 802 - DNA, 19 bp, synthetic construct
  source 1..19: mol_type = other DNA
gatgtaaggagctgctgtg

SEQ ID NO: 803 - DNA, 19 bp, synthetic construct
  source 1..19: mol_type = other DNA
gcaaaggcaggcaggcagg

SEQ ID NO: 804 - DNA, 18 bp, synthetic construct
  source 1..18: mol_type = other DNA
gcagctggtttctaagat

SEQ ID NO: 805 - DNA, 19 bp, synthetic construct
  source 1..19: mol_type = other DNA
gcaggagctgctggaggct

SEQ ID NO: 806 - DNA, 19 bp, synthetic construct
  source 1..19: mol_type = other DNA
ggaaacagcctgcgaaggc

SEQ ID NO: 807 - DNA, 19 bp, synthetic construct
  source 1..19: mol_type = other DNA
ggaggaaacagaggtttgc

SEQ ID NO: 808 - DNA, 19 bp, synthetic construct
  source 1..19: mol_type = other DNA
ggtggcaggagagggcacg

SEQ ID NO: 809 - DNA, 18 bp, synthetic construct
  source 1..18: mol_type = other DNA
ggtgttgaagtggaggaa

SEQ ID NO: 810 - DNA, 19 bp, synthetic construct
  source 1..19: mol_type = other DNA
gtaaacggtagtgctgggg

SEQ ID NO: 811 - DNA, 18 bp, synthetic construct
  source 1..18: mol_type = other DNA
gtctgagcaaaggcaggc

SEQ ID NO: 812 - DNA, 19 bp, synthetic construct
  source 1..19: mol_type = other DNA
ggggctctgtggggctggc

SEQ ID NO: 813 - DNA, 18 bp, synthetic construct
  source 1..18: mol_type = other DNA
taggaaggtggatgaggc

SEQ ID NO: 814 - DNA, 19 bp, synthetic construct
  source 1..19: mol_type = other DNA
taggaaggtggatgaggca

SEQ ID NO: 815 - DNA, 19 bp, synthetic construct
  source 1..19: mol_type = other DNA
tcagaaagcaggagctgct

SEQ ID NO: 816 - DNA, 18 bp, synthetic construct
  source 1..18: mol_type = other DNA
tgcgtctaagccccagca

SEQ ID NO: 817 - DNA, 18 bp, synthetic construct
  source 1..18: mol_type = other DNA
tgggctggggaagaaggt

SEQ ID NO: 818 - DNA, 19 bp, synthetic construct
  source 1..19: mol_type = other DNA
tgggctggggaagaaggtg

SEQ ID NO: 819 - DNA, 18 bp, synthetic construct
  source 1..18: mol_type = other DNA
aaagcaggagctgctgga

SEQ ID NO: 820 - DNA, 19 bp, synthetic construct
  source 1..19: mol_type = other DNA
aaagcaggagctgctggag

SEQ ID NO: 821 - DNA, 18 bp, synthetic construct
  source 1..18: mol_type = other DNA
aaggtggcaggagagggc

SEQ ID NO: 822 - DNA, 19 bp, synthetic construct
  source 1..19: mol_type = other DNA
aaggtggcaggagagggca

SEQ ID NO: 823 - DNA, 19 bp, synthetic construct
  source 1..19: mol_type = other DNA
aatgaggcctagaagagca

SEQ ID NO: 824 - DNA, 18 bp, synthetic construct
  source 1..18: mol_type = other DNA
agggttttggtggcaatg

SEQ ID NO: 825 - DNA, 18 bp, synthetic construct
  source 1..18: mol_type = other DNA
attgtgccggcacatgaa

SEQ ID NO: 826 - DNA, 19 bp, synthetic construct
  source 1..19: mol_type = other DNA
gaaaaaagcagatgaagag

SEQ ID NO: 827 - DNA, 19 bp, synthetic construct
  source 1..19: mol_type = other DNA
gaaacagaggtttgccgga

SEQ ID NO: 828 - DNA, 18 bp, synthetic construct
  source 1..18: mol_type = other DNA
gaaacagcctgcgaaggc

SEQ ID NO: 829 - DNA, 18 bp, synthetic construct
  source 1..18: mol_type = other DNA
gaggaaacagaggtttgc

SEQ ID NO: 830 - DNA, 19 bp, synthetic construct
  source 1..19: mol_type = other DNA
gaggaaacagaggtttgcc

SEQ ID NO: 831 - DNA, 19 bp, synthetic construct
  source 1..19: mol_type = other DNA
gcctagaagagcagtaagg

SEQ ID NO: 832 - DNA, 18 bp, synthetic construct
  source 1..18: mol_type = other DNA
gctggggaagaaggtgtc

SEQ ID NO: 833 - DNA, 19 bp, synthetic construct
  source 1..19: mol_type = other DNA
ggagaaataaggagaggca

SEQ ID NO: 834 - DNA, 18 bp, synthetic construct
  source 1..18: mol_type = other DNA
ggcggggctctgtggggc

SEQ ID NO: 835 - DNA, 19 bp, synthetic construct
  source 1..19: mol_type = other DNA
ggcggggctctgtggggct

SEQ ID NO: 836 - DNA, 19 bp, synthetic construct
  source 1..19: mol_type = other DNA
ggctggggaagaaggtgtc

SEQ ID NO: 837 - DNA, 19 bp, synthetic construct
  source 1..19: mol_type = other DNA
ggttggggcaaagagggaa

SEQ ID NO: 838 - DNA, 18 bp, synthetic construct
  source 1..18: mol_type = other DNA
gtaagggcagctttggtg

SEQ ID NO: 839 - DNA, 18 bp, synthetic construct
  source 1..18: mol_type = other DNA
gtggcaggagagggcacg

SEQ ID NO: 840 - DNA, 18 bp, synthetic construct
  source 1..18: mol_type = other DNA
gttggggcaaagagggaa

SEQ ID NO: 841 - DNA, 19 bp, synthetic construct
  source 1..19: mol_type = other DNA
gttggggcaaagagggaaa

SEQ ID NO: 842 - DNA, 19 bp, synthetic construct
  source 1..19: mol_type = other DNA
taaggggcaaacagtctga

SEQ ID NO: 843 - DNA, 19 bp, synthetic construct
  source 1..19: mol_type = other DNA
tgggttaatgagtgactgc

SEQ ID NO: 844 - DNA, 18 bp, synthetic construct
  source 1..18: mol_type = other DNA
gaagagaaggtggcagga

SEQ ID NO: 845 - DNA, 20 bp, synthetic construct
  source 1..20: mol_type = other DNA
gaagcaaggaaacagcctgc

SEQ ID NO: 846 - DNA, 19 bp, synthetic construct
  source 1..19: mol_type = other DNA
gaaggcgtttgcacatgca

SEQ ID NO: 847 - DNA, 19 bp, synthetic construct
  source 1..19: mol_type = other DNA
gaccagagctctgggcaga

SEQ ID NO: 848 - DNA, 18 bp, synthetic construct
  source 1..18: mol_type = other DNA
gactttgcatgtgcaaac

SEQ ID NO: 849 - DNA, 18 bp, synthetic construct
  source 1..18: mol_type = other DNA
gagatgtaaggagctgct

SEQ ID NO: 850 - DNA, 19 bp, synthetic construct
  source 1..19: mol_type = other DNA
gattgtgccggcacatgaa

SEQ ID NO: 851 - DNA, 18 bp, synthetic construct
  source 1..18: mol_type = other DNA
gctgttgttgaaggcgtt

SEQ ID NO: 852 - DNA, 19 bp, synthetic construct
  source 1..19: mol_type = other DNA
ggaatctggagtggtctcc

SEQ ID NO: 853 - DNA, 18 bp, synthetic construct
  source 1..18: mol_type = other DNA
ggagagactgaggctggg

SEQ ID NO: 854 - DNA, 18 bp, synthetic construct
  source 1..18: mol_type = other DNA
gttgttgaaggcgtttgc

SEQ ID NO: 855 - DNA, 18 bp, synthetic construct
  source 1..18: mol_type = other DNA
tctgagggtgaaggatag

SEQ ID NO: 856 - DNA, 19 bp, synthetic construct
  source 1..19: mol_type = other DNA
tgaggaggaaacagaggtt

SEQ ID NO: 857 - RNA, 20 nt, synthetic construct
  source 1..20: mol_type = other RNA
ggagcgagagagcacagcga

SEQ ID NO: 858 - RNA, 20 nt, synthetic construct
  source 1..20: mol_type = other RNA
gacctttggcctacggcgac

SEQ ID NO: 859 - RNA, 20 nt, synthetic construct
  source 1..20: mol_type = other RNA
aacttggagaagggaagtca

SEQ ID NO: 860 - RNA, 20 nt, synthetic construct
  source 1..20: mol_type = other RNA
gtaggctcgtcccaaaggcg

SEQ ID NO: 861 - RNA, 20 nt, synthetic construct
  source 1..20: mol_type = other RNA
gaaagtccctctctctaacc

SEQ ID NO: 862 - RNA, 20 nt, synthetic construct
  source 1..20: mol_type = other RNA
gagtagcgcgagcacagcta

SEQ ID NO: 863 - RNA, 20 nt, synthetic construct
  source 1..20: mol_type = other RNA
aagtggaggcgtcgcgctgg

SEQ ID NO: 864 - RNA, 20 nt, synthetic construct
  source 1..20: mol_type = other RNA
gggagaggaaggaccagagc

SEQ ID NO: 865 - RNA, 20 nt, synthetic construct
  source 1..20: mol_type = other RNA
tcccttctccaagttctcct

SEQ ID NO: 866 - RNA, 20 nt, synthetic construct
  source 1..20: mol_type = other RNA
tggatctcggggaagcggcg

SEQ ID NO: 867 - RNA, 20 nt, synthetic construct
  source 1..20: mol_type = other RNA
cgcgagcacagctaaggcca

SEQ ID NO: 868 - RNA, 20 nt, synthetic construct
  source 1..20: mol_type = other RNA
actctctctttctggcctgg

SEQ ID NO: 869 - RNA, 20 nt, synthetic construct
  source 1..20: mol_type = other RNA
ggccgagatgtctcgctccg

SEQ ID NO: 870 - RNA, 20 nt, synthetic construct
  source 1..20: mol_type = other RNA
aggtttgtgaacgcgtggag

SEQ ID NO: 871 - RNA, 20 nt, synthetic construct
  source 1..20: mol_type = other RNA
actcacgctggatagcctcc

SEQ ID NO: 872 - RNA, 20 nt, synthetic construct
  source 1..20: mol_type = other RNA
gaggggcgcttggggtctgg

SEQ ID NO: 873 - RNA, 20 nt, synthetic construct
  source 1..20: mol_type = other RNA
tttggcctacggcgacggga

SEQ ID NO: 874 - RNA, 20 nt, synthetic construct
  source 1..20: mol_type = other RNA
gaggtttgtgaacgcgtgga

SEQ ID NO: 875 - RNA, 20 nt, synthetic construct
  source 1..20: mol_type = other RNA
ctccttggtggcccgccgtg

SEQ ID NO: 876 - RNA, 20 nt, synthetic construct
  source 1..20: mol_type = other RNA
cgcagtgccaggttagagag

SEQ ID NO: 877 - DNA, 20 bp, synthetic construct
  source 1..20: mol_type = other DNA
gagtgatcatatattagaag

SEQ ID NO: 878 - DNA, 20 bp, synthetic construct
  source 1..20: mol_type = other DNA
gtctctgcccatcctcctgg

SEQ ID NO: 879 - DNA, 20 bp, synthetic construct
  source 1..20: mol_type = other DNA
attatttagcatcactttgg

SEQ ID NO: 880 - DNA, 20 bp, synthetic construct
  source 1..20: mol_type = other DNA
gactacaagggtaccatatt

SEQ ID NO: 881 - DNA, 20 bp, synthetic construct
  source 1..20: mol_type = other DNA
tatgatctccagagaaattc

SEQ ID NO: 882 - DNA, 20 bp, synthetic construct
  source 1..20: mol_type = other DNA
tgtgggagtaggcatggtag

SEQ ID NO: 883 - DNA, 20 bp, synthetic construct
  source 1..20: mol_type = other DNA
cttgtcttgaggcatctggg

SEQ ID NO: 884 - DNA, 20 bp, synthetic construct
  source 1..20: mol_type = other DNA
atctgccaccttctgcagga

SEQ ID NO: 885 - DNA, 20 bp, synthetic construct
  source 1..20: mol_type = other DNA
ttgcacagaaagtctgttgg

SEQ ID NO: 886 - DNA, 20 bp, synthetic construct
  source 1..20: mol_type = other DNA
tgaaattaatttcagaggtg

SEQ ID NO: 887 - DNA, 20 bp, synthetic construct
  source 1..20: mol_type = other DNA
agggagtgtggtaaaattag

SEQ ID NO: 888 - DNA, 20 bp, synthetic construct
  source 1..20: mol_type = other DNA
tcaaggaggaagtctcagct

SEQ ID NO: 889 - DNA, 20 bp, synthetic construct
  source 1..20: mol_type = other DNA
ccaggaggatgggcagagac

SEQ ID NO: 890 - DNA, 20 bp, synthetic construct
  source 1..20: mol_type = other DNA
ttatttagcatcactttggc

SEQ ID NO: 891 - DNA, 20 bp, synthetic construct
  source 1..20: mol_type = other DNA
actacaagggtaccatattt

SEQ ID NO: 892 - DNA, 20 bp, synthetic construct
  source 1..20: mol_type = other DNA
atgatctccagagaaattca

SEQ ID NO: 893 - DNA, 20 bp, synthetic construct
  source 1..20: mol_type = other DNA
atctaagaagtccccagcag

SEQ ID NO: 894 - DNA, 20 bp, synthetic construct
  source 1..20: mol_type = other DNA
gtcttgaggcatctgggcgg

SEQ ID NO: 895 - DNA, 20 bp, synthetic construct
  source 1..20: mol_type = other DNA
caatatctgccaccttctgc

SEQ ID NO: 896 - DNA, 20 bp, synthetic construct
  source 1..20: mol_type = other DNA
gttgcacagaaagtctgttg

SEQ ID NO: 897 - DNA, 20 bp, synthetic construct
  source 1..20: mol_type = other DNA
gaaattaatttcagaggtgt

SEQ ID NO: 898 - DNA, 20 bp, synthetic construct
  source 1..20: mol_type = other DNA
gggagtgtggtaaaattaga

SEQ ID NO: 899 - DNA, 20 bp, synthetic construct
  source 1..20: mol_type = other DNA
acttcctccttgataccacc

SEQ ID NO: 900 - DNA, 20 bp, synthetic construct
  source 1..20: mol_type = other DNA
ccagtctctgcccatcctcc

SEQ ID NO: 901 - DNA, 20 bp, synthetic construct
  source 1..20: mol_type = other DNA
ccccaaaccatctgactaca

SEQ ID NO: 902 - DNA, 20 bp, synthetic construct
  source 1..20: mol_type = other DNA
aaagagtgttaacccaaata

SEQ ID NO: 903 - DNA, 20 bp, synthetic construct
  source 1..20: mol_type = other DNA
caaattgccctgaatttctc

SEQ ID NO: 904 - DNA, 20 bp, synthetic construct
  source 1..20: mol_type = other DNA
caagctgagagcctctgctg

SEQ ID NO: 905 - DNA, 20 bp, synthetic construct
  source 1..20: mol_type = other DNA
tcttgaggcatctgggcgga

SEQ ID NO: 906 - DNA, 20 bp, synthetic construct
  source 1..20: mol_type = other DNA
ctgcagaaggtggcagatat

SEQ ID NO: 907 - DNA, 20 bp, synthetic construct
  source 1..20: mol_type = other DNA
agttgcacagaaagtctgtt

SEQ ID NO: 908 - DNA, 20 bp, synthetic construct
  source 1..20: mol_type = other DNA
aaattaatttcagaggtgtg

SEQ ID NO: 909 - DNA, 20 bp, synthetic construct
  source 1..20: mol_type = other DNA
gaaacagaaatctgaccgct

SEQ ID NO: 910 - DNA, 20 bp, synthetic construct
  source 1..20: mol_type = other DNA
tcctccttgataccaccagg

SEQ ID NO: 911 - DNA, 20 bp, synthetic construct
  source 1..20: mol_type = other DNA
agacactaactttctcccta

SEQ ID NO: 912 - DNA, 20 bp, synthetic construct
  source 1..20: mol_type = other DNA
ccttgtagtcagatggtttg

SEQ ID NO: 913 - DNA, 20 bp, synthetic construct
  source 1..20: mol_type = other DNA
tatttgggttaacactcttt

SEQ ID NO: 914 - DNA, 20 bp, synthetic construct
  source 1..20: mol_type = other DNA
cagagaaattcagggcaatt

SEQ ID NO: 915 - DNA, 20 bp, synthetic construct
  source 1..20: mol_type = other DNA
acaagctgagagcctctgct

SEQ ID NO: 916 - DNA, 20 bp, synthetic construct
  source 1..20: mol_type = other DNA
tgggcggagggctatgatac

SEQ ID NO: 917 - DNA, 20 bp, synthetic construct
  source 1..20: mol_type = other DNA
aggtggcagatattggcagc

SEQ ID NO: 918 - DNA, 20 bp, synthetic construct
  source 1..20: mol_type = other DNA
aagttgcacagaaagtctgt

SEQ ID NO: 919 - DNA, 20 bp, synthetic construct
  source 1..20: mol_type = other DNA
ttaatttcagaggtgtgggg

SEQ ID NO: 920 - DNA, 20 bp, synthetic construct
  source 1..20: mol_type = other DNA
aaacagaaatctgaccgctt

SEQ ID NO: 921 - DNA, 20 bp, synthetic construct
  source 1..20: mol_type = other DNA
tcctcctggtggtatcaagg

SEQ ID NO: 922 - DNA, 20 bp, synthetic construct
  source 1..20: mol_type = other DNA
gacactaactttctccctat

SEQ ID NO: 923 - DNA, 20 bp, synthetic construct
  source 1..20: mol_type = other DNA
cccaaaccatctgactacaa

SEQ ID NO: 924 - DNA, 20 bp, synthetic construct
  source 1..20: mol_type = other DNA
tgtcttgggatgaaaatgac

SEQ ID NO: 925 - DNA, 20 bp, synthetic construct
  source 1..20: mol_type = other DNA
aaattcagggcaatttggtg

SEQ ID NO: 926 - DNA, 20 bp, synthetic construct
  source 1..20: mol_type = other DNA
gacaagctgagagcctctgc

SEQ ID NO: 927 - DNA, 20 bp, synthetic construct
  source 1..20: mol_type = other DNA
tactggccccatcctgcaga

SEQ ID NO: 928 - DNA, 20 bp, synthetic construct
  source 1..20: mol_type = other DNA
attggcagctggcaccagtg

SEQ ID NO: 929 - DNA, 20 bp, synthetic construct
  source 1..20: mol_type = other DNA
accaaattcagtccacagta

SEQ ID NO: 930 - DNA, 20 bp, synthetic construct
  source 1..20: mol_type = other DNA
taatttcagaggtgtgggga

SEQ ID NO: 931 - DNA, 20 bp, synthetic construct
  source 1..20: mol_type = other DNA
aacagaaatctgaccgcttg

SEQ ID NO: 932 - DNA, 20 bp, synthetic construct
  source 1..20: mol_type = other DNA
ccatcctcctggtggtatca

SEQ ID NO: 933 - DNA, 20 bp, synthetic construct
  source 1..20: mol_type = other DNA
aaataatactgactcccata

SEQ ID NO: 934 - DNA, 20 bp, synthetic construct
  source 1..20: mol_type = other DNA
cccttgtagtcagatggttt

SEQ ID NO: 935 - DNA, 20 bp, synthetic construct
  source 1..20: mol_type = other DNA
cttgggatgaaaatgacagg

SEQ ID NO: 936 - DNA, 20 bp, synthetic construct
  source 1..20: mol_type = other DNA
aattcagggcaatttggtgt

SEQ ID NO: 937 - DNA, 20 bp, synthetic construct
  source 1..20: mol_type = other DNA
gaggctctcagcttgtcttg

SEQ ID NO: 938 - DNA, 20 bp, synthetic construct
  source 1..20: mol_type = other DNA
tggccccatcctgcagaagg

SEQ ID NO: 939 - DNA, 20 bp, synthetic construct
  source 1..20: mol_type = other DNA
tgatcacaatggaaccgcac

SEQ ID NO: 940 - DNA, 20 bp, synthetic construct
  source 1..20: mol_type = other DNA
tccttactgtggactgaatt

SEQ ID NO: 941 - DNA, 20 bp, synthetic construct
  source 1..20: mol_type = other DNA
agaggtgtggggagggctta

SEQ ID NO: 942 - DNA, 20 bp, synthetic construct
  source 1..20: mol_type = other DNA
accgcttggggccaccttgc

SEQ ID NO: 943 - DNA, 20 bp, synthetic construct
  source 1..20: mol_type = other DNA
ccttgataccaccaggagga

SEQ ID NO: 944 - DNA, 20 bp, synthetic construct
  source 1..20: mol_type = other DNA
taaataatactgactcccat

SEQ ID NO: 945 - DNA, 20 bp, synthetic construct
  source 1..20: mol_type = other DNA
acccttgtagtcagatggtt

SEQ ID NO: 946 - DNA, 20 bp, synthetic construct
  source 1..20: mol_type = other DNA
ttgggatgaaaatgacaggt

SEQ ID NO: 947 - DNA, 20 bp, synthetic construct
  source 1..20: mol_type = other DNA
gggcaatttggtgtgggagt

SEQ ID NO: 948 - DNA, 20 bp, synthetic construct
  source 1..20: mol_type = other DNA
tcagcttgtcttgaggcatc

SEQ ID NO: 949 - DNA, 20 bp, synthetic construct
  source 1..20: mol_type = other DNA
ctgccaccttctgcaggatg

SEQ ID NO: 950 - DNA, 20 bp, synthetic construct
  source 1..20: mol_type = other DNA
ttcagaaatgatgatcacaa

SEQ ID NO: 951 - DNA, 20 bp, synthetic construct
  source 1..20: mol_type = other DNA
ttaatttcacttccttactg

SEQ ID NO: 952 - DNA, 20 bp, synthetic construct
  source 1..20: mol_type = other DNA
gaggtgtggggagggcttaa

SEQ ID NO: 953 - DNA, 20 bp, synthetic construct
  source 1..20: mol_type = other DNA
cttgataccaccaggaggat

SEQ ID NO: 954 - DNA, 20 bp, synthetic construct
  source 1..20: mol_type = other DNA
agtattatttagcatcactt

SEQ ID NO: 955 - DNA, 20 bp, synthetic construct
  source 1..20: mol_type = other DNA
atggtacccttgtagtcaga

SEQ ID NO: 956 - DNA, 20 bp, synthetic construct
  source 1..20: mol_type = other DNA
atttctctggagatcataag

SEQ ID NO: 957 - DNA, 20 bp, synthetic construct
  source 1..20: mol_type = other DNA
atttggtgtgggagtaggca

SEQ ID NO: 958 - DNA, 20 bp, synthetic construct
  source 1..20: mol_type = other DNA
cagcttgtcttgaggcatct

SEQ ID NO: 959 - DNA, 20 bp, synthetic construct
  source 1..20: mol_type = other DNA
tctgccaccttctgcaggat

SEQ ID NO: 960 - DNA, 20 bp, synthetic construct
  source 1..20: mol_type = other DNA
tctgaacgtcagactgttga

SEQ ID NO: 961 - DNA, 20 bp, synthetic construct
  source 1..20: mol_type = other DNA
ggaagtgaaattaatttcag

SEQ ID NO: 962 - DNA, 20 bp, synthetic construct
  source 1..20: mol_type = other DNA
ggggagggcttaagggagtg

SEQ ID NO: 963 - DNA, 20 bp, synthetic construct
  source 1..20: mol_type = other DNA
ccctgcaaggtggccccaag

SEQ ID NO: 964 - DNA, 20 bp, synthetic construct
  source 1..20: mol_type = other DNA
tgcatgttggcttagcttgg

SEQ ID NO: 965 - DNA, 20 bp, synthetic construct
  source 1..20: mol_type = other DNA
ggcatccttggggaagctga

SEQ ID NO: 966 - DNA, 20 bp, synthetic construct
  source 1..20: mol_type = other DNA
aggcagcagctcccggagtc

SEQ ID NO: 967 - DNA, 20 bp, synthetic construct
  source 1..20: mol_type = other DNA
tgcctggctccacgccctgc

SEQ ID NO: 968 - DNA, 20 bp, synthetic construct
  source 1..20: mol_type = other DNA
gtcagagccccaaggtaaaa

SEQ ID NO: 969 - DNA, 20 bp, synthetic construct
  source 1..20: mol_type = other DNA
acagagaaaccattctgaat

SEQ ID NO: 970 - DNA, 20 bp, synthetic construct
  source 1..20: mol_type = other DNA
ctgaattggggatgggggtg

SEQ ID NO: 971 - DNA, 20 bp, synthetic construct
  source 1..20: mol_type = other DNA
gtcctgctggggcaggccat

SEQ ID NO: 972 - DNA, 20 bp, synthetic construct
  source 1..20: mol_type = other DNA
gacctgaagtctccctccgg

SEQ ID NO: 973 - DNA, 20 bp, synthetic construct
  source 1..20: mol_type = other DNA
ccgcttggggccaccttgca

SEQ ID NO: 974 - DNA, 20 bp, synthetic construct
  source 1..20: mol_type = other DNA
gcatgttggcttagcttggc

SEQ ID NO: 975 - DNA, 20 bp, synthetic construct
  source 1..20: mol_type = other DNA
aggctgtgtgcttctgagct

SEQ ID NO: 976 - DNA, 20 bp, synthetic construct
  source 1..20: mol_type = other DNA
tcgtgccctcagcttcccca

SEQ ID NO: 977 - DNA, 20 bp, synthetic construct
  source 1..20: mol_type = other DNA
agactccgggagctgctgcc

SEQ ID NO: 978 - DNA, 20 bp, synthetic construct
  source 1..20: mol_type = other DNA
gcctggctccacgccctgct

SEQ ID NO: 979 - DNA, 20 bp, synthetic construct
  source 1..20: mol_type = other DNA
gagccccaaggtaaaaaggc

SEQ ID NO: 980 - DNA, 20 bp, synthetic construct
  source 1..20: mol_type = other DNA
cagagaaaccattctgaatt

SEQ ID NO: 981 - DNA, 20 bp, synthetic construct
  source 1..20: mol_type = other DNA
attggggatgggggtgagga

SEQ ID NO: 982 - DNA, 20 bp, synthetic construct
  source 1..20: mol_type = other DNA
ttccaatggcctgccccagc

SEQ ID NO: 983 - DNA, 20 bp, synthetic construct
  source 1..20: mol_type = other DNA
gctgacctgaagtctccctc

SEQ ID NO: 984 - DNA, 20 bp, synthetic construct
  source 1..20: mol_type = other DNA
aaaaaactctccctgcaagg

SEQ ID NO: 985 - DNA, 20 bp, synthetic construct
  source 1..20: mol_type = other DNA
tagcttggcgggctcccaac

SEQ ID NO: 986 - DNA, 20 bp, synthetic construct
  source 1..20: mol_type = other DNA
cttctgagctgggcatccga

SEQ ID NO: 987 - DNA, 20 bp, synthetic construct
  source 1..20: mol_type = other DNA
ttggggaagctgagggcacg

SEQ ID NO: 988 - DNA, 20 bp, synthetic construct
  source 1..20: mol_type = other DNA
tccgggagctgctgcctggc

SEQ ID NO: 989 - DNA, 20 bp, synthetic construct
  source 1..20: mol_type = other DNA
acccagcagggcgtggagcc

SEQ ID NO: 990 - DNA, 20 bp, synthetic construct
  source 1..20: mol_type = other DNA
agccccaaggtaaaaaggcc

SEQ ID NO: 991 - DNA, 20 bp, synthetic construct
  source 1..20: mol_type = other DNA
agagaaaccattctgaattg

SEQ ID NO: 992 - DNA, 20 bp, synthetic construct
  source 1..20: mol_type = other DNA
ttggggatgggggtgaggat

SEQ ID NO: 993 - DNA, 20 bp, synthetic construct
  source 1..20: mol_type = other DNA
aactctttcacatcttccaa

SEQ ID NO: 994 - DNA, 20 bp, synthetic construct
  source 1..20: mol_type = other DNA
agggagacttcaggtcagcc

SEQ ID NO: 995 - DNA, 20 bp, synthetic construct
  source 1..20: mol_type = other DNA
tcaaaaaaactctccctgca

SEQ ID NO: 996 - DNA, 20 bp, synthetic construct
  source 1..20: mol_type = other DNA
gcgggctcccaactggtgac

SEQ ID NO: 997 - DNA, 20 bp, synthetic construct
  source 1..20: mol_type = other DNA
tgggcatccgaaggcatcct

SEQ ID NO: 998 - DNA, 20 bp, synthetic construct
  source 1..20: mol_type = other DNA
gggaagctgagggcacgagg

SEQ ID NO: 999 - DNA, 20 bp, synthetic construct
  source 1..20: mol_type = other DNA
cccagccaggcagcagctcc

SEQ ID NO: 1000 - DNA, 20 bp, synthetic construct
  source 1..20: mol_type = other DNA
aggtaggacccagcagggcg

SEQ ID NO: 1001 - DNA, 20 bp, synthetic construct
  source 1..20: mol_type = other DNA
gctaaattaagatgctttcc

SEQ ID NO: 1002 - DNA, 20 bp, synthetic construct
  source 1..20: mol_type = other DNA
aaaccattctgaattgggga

SEQ ID NO: 1003 - DNA, 20 bp, synthetic construct
  source 1..20: mol_type = other DNA
atgggggtgaggatgggaac

SEQ ID NO: 1004 - DNA, 20 bp, synthetic construct
  source 1..20: mol_type = other DNA
agttgtctatttccttccac

SEQ ID NO: 1005 - DNA, 20 bp, synthetic construct
  source 1..20: mol_type = other DNA
cttcaggtcagccaggtgtc

SEQ ID NO: 1006 - DNA, 20 bp, synthetic construct
  source 1..20: mol_type = other DNA
acatgcaaagaaacaagtga

SEQ ID NO: 1007 - DNA, 20 bp, synthetic construct
  source 1..20: mol_type = other DNA
tcactaaccagtcaccagtt

SEQ ID NO: 1008 - DNA, 20 bp, synthetic construct
  source 1..20: mol_type = other DNA
gggcatccgaaggcatcctt

SEQ ID NO: 1009 - DNA, 20 bp, synthetic construct
  source 1..20: mol_type = other DNA
ggaagctgagggcacgagga

SEQ ID NO: 1010 - DNA, 20 bp, synthetic construct
  source 1..20: mol_type = other DNA
ccgggagctgctgcctggct

SEQ ID NO: 1011 - DNA, 20 bp, synthetic construct
  source 1..20: mol_type = other DNA
ctgacaggtaggacccagca

SEQ ID NO: 1012 - DNA, 20 bp, synthetic construct
  source 1..20: mol_type = other DNA
atttagcgtgcagtctcagc

SEQ ID NO: 1013 - DNA, 20 bp, synthetic construct
  source 1..20: mol_type = other DNA
aaccattctgaattggggat

SEQ ID NO: 1014 - DNA, 20 bp, synthetic construct
  source 1..20: mol_type = other DNA
aacaggagtctgtgtcctgc

SEQ ID NO: 1015 - DNA, 20 bp, synthetic construct
  source 1..20: mol_type = other DNA
tgtctatttccttccaccgg

SEQ ID NO: 1016 - DNA, 20 bp, synthetic construct
  source 1..20: mol_type = other DNA
tggttcatactccagacacc

SEQ ID NO: 1017 - DNA, 20 bp, synthetic construct
  source 1..20: mol_type = other DNA
aacatgcaaagaaacaagtg

SEQ ID NO: 1018 - DNA, 20 bp, synthetic construct
  source 1..20: mol_type = other DNA
atcactaaccagtcaccagt

SEQ ID NO: 1019 - DNA, 20 bp, synthetic construct
  source 1..20: mol_type = other DNA
ggcatccgaaggcatccttg

SEQ ID NO: 1020 - DNA, 20 bp, synthetic construct
  source 1..20: mol_type = other DNA
gaagctgagggcacgaggag

SEQ ID NO: 1021 - DNA, 20 bp, synthetic construct
  source 1..20: mol_type = other DNA
attgtgtaggaatcccagcc

SEQ ID NO: 1022 - DNA, 20 bp, synthetic construct
  source 1..20: mol_type = other DNA
tctgacaggtaggacccagc

SEQ ID NO: 1023 - DNA, 20 bp, synthetic construct
  source 1..20: mol_type = other DNA
ctctgtttatctggaatggc

SEQ ID NO: 1024 - DNA, 20 bp, synthetic construct
  source 1..20: mol_type = other DNA
accattctgaattggggatg

SEQ ID NO: 1025 - DNA, 20 bp, synthetic construct
  source 1..20: mol_type = other DNA
acaggagtctgtgtcctgct

SEQ ID NO: 1026 - DNA, 20 bp, synthetic construct
  source 1..20: mol_type = other DNA
gtctatttccttccaccgga

SEQ ID NO: 1027 - DNA, 20 bp, synthetic construct
  source 1..20: mol_type = other DNA
aaccatgtatcagcaccgaa

SEQ ID NO: 1028 - DNA, 20 bp, synthetic construct
  source 1..20: mol_type = other DNA
tcacttgtttctttgcatgt

SEQ ID NO: 1029 - DNA, 20 bp, synthetic construct
  source 1..20: mol_type = other DNA
ctggtgactggttagtgatg

SEQ ID NO: 1030 - DNA, 20 bp, synthetic construct
  source 1..20: mol_type = other DNA
agcttccccaaggatgcctt

SEQ ID NO: 1031 - DNA, 20 bp, synthetic construct
  source 1..20: mol_type = other DNA
gaggaggggctgccagactc

SEQ ID NO: 1032 - DNA, 20 bp, synthetic construct
  source 1..20: mol_type = other DNA
ttcctacacaatgcgttgcc

SEQ ID NO: 1033 - DNA, 20 bp, synthetic construct
  source 1..20: mol_type = other DNA
tcctacctgtcagagcccca

SEQ ID NO: 1034 - DNA, 20 bp, synthetic construct
  source 1..20: mol_type = other DNA
gtttctctgtttatctggaa

SEQ ID NO: 1035 - DNA, 20 bp, synthetic construct
  source 1..20: mol_type = other DNA
ccattctgaattggggatgg

SEQ ID NO: 1036 - DNA, 20 bp, synthetic construct
  source 1..20: mol_type = other DNA
caggagtctgtgtcctgctg

SEQ ID NO: 1037 - DNA, 20 bp, synthetic construct
  source 1..20: mol_type = other DNA
tgaagtctccctccggtgga

SEQ ID NO: 1038 - DNA, 20 bp, synthetic construct
  source 1..20: mol_type = other DNA
ctttgcatgttggcttagct

SEQ ID NO: 1039 - DNA, 20 bp, synthetic construct
  source 1..20: mol_type = other DNA
tagtgatgaggctagtgatg

SEQ ID NO: 1040 - DNA, 20 bp, synthetic construct
  source 1..20: mol_type = other DNA
aggcatccttggggaagctg

SEQ ID NO: 1041 - DNA, 20 bp, synthetic construct
  source 1..20: mol_type = other DNA
aggaggggctgccagactcc

SEQ ID NO: 1042 - DNA, 20 bp, synthetic construct
  source 1..20: mol_type = other DNA
agccaggcaacgcattgtgt

SEQ ID NO: 1043 - DNA, 20 bp, synthetic construct
  source 1..20: mol_type = other DNA
accttggggctctgacaggt

SEQ ID NO: 1044 - DNA, 20 bp, synthetic construct
  source 1..20: mol_type = other DNA
gaatggtttctctgtttatc

SEQ ID NO: 1045 - DNA, 20 bp, synthetic construct
  source 1..20: mol_type = other DNA
cccccatccccaattcagaa

SEQ ID NO: 1046 - DNA, 20 bp, synthetic construct
  source 1..20: mol_type = other DNA
agtctgtgtcctgctggggc

SEQ ID NO: 1047 - DNA, 20 bp, synthetic construct
  source 1..20: mol_type = other DNA
ttccaccggagggagacttc

SEQ ID NO: 1048 - DNA, 20 bp, synthetic construct
  source 1..20: mol_type = other DNA
aacctttcggtgctgataca

SEQ ID NO: 1049 - DNA, 20 bp, synthetic construct
  source 1..20: mol_type = other DNA
accttgctgtgggccgagcc

SEQ ID NO: 1050 - DNA, 20 bp, synthetic construct
  source 1..20: mol_type = other DNA
cccctcagtatttacccaaa

SEQ ID NO: 1051 - DNA, 20 bp, synthetic construct
  source 1..20: mol_type = other DNA
tctgggtatggagtggagtc

SEQ ID NO: 1052 - DNA, 20 bp, synthetic construct
  source 1..20: mol_type = other DNA
caaaattggagtcagccttg

SEQ ID NO: 1053 - DNA, 20 bp, synthetic construct
  source 1..20: mol_type = other DNA
cagcagctggggagagctgg

SEQ ID NO: 1054 - DNA, 20 bp, synthetic construct
  source 1..20: mol_type = other DNA
aaacaacaccattaggaaac

SEQ ID NO: 1055 - DNA, 20 bp, synthetic construct
  source 1..20: mol_type = other DNA
ttaaaaagggtcaggggacg

SEQ ID NO: 1056 - DNA, 20 bp, synthetic construct
  source 1..20: mol_type = other DNA
ctgccttcagagccggtgcc

SEQ ID NO: 1057 - DNA, 20 bp, synthetic construct
  source 1..20: mol_type = other DNA
gccgcggccccagagctggc

SEQ ID NO: 1058 - DNA, 20 bp, synthetic construct
  source 1..20: mol_type = other DNA
gaggccaccagcagcgcgcg

SEQ ID NO: 1059 - DNA, 20 bp, synthetic construct
  source 1..20: mol_type = other DNA
gtctgacttctagaaccttt

SEQ ID NO: 1060 - DNA, 20 bp, synthetic construct
  source 1..20: mol_type = other DNA
aggcgagaagaccttgctgt

SEQ ID NO: 1061 - DNA, 20 bp, synthetic construct
  source 1..20: mol_type = other DNA
ccctttgggtaaatactgag

SEQ ID NO: 1062 - DNA, 20 bp, synthetic construct
  source 1..20: mol_type = other DNA
ctgcttctctgggtatggag

SEQ ID NO: 1063 - DNA, 20 bp, synthetic construct
  source 1..20: mol_type = other DNA
ggctcaacagctacacctca

SEQ ID NO: 1064 - DNA, 20 bp, synthetic construct
  source 1..20: mol_type = other DNA
ccattaggaaactgggggga

SEQ ID NO: 1065 - DNA, 20 bp, synthetic construct
  source 1..20: mol_type = other DNA
cctaatggtgttgtttaaaa

SEQ ID NO: 1066 - DNA, 20 bp, synthetic construct
  source 1..20: mol_type = other DNA
taaaaagggtcaggggacgg

SEQ ID NO: 1067 - DNA, 20 bp, synthetic construct
  source 1..20: mol_type = other DNA
caccggctctgaaggcagca

SEQ ID NO: 1068 - DNA, 20 bp, synthetic construct
  source 1..20: mol_type = other DNA
tcccgccagctctggggccg

SEQ ID NO: 1069 - DNA, 20 bp, synthetic construct
  source 1..20: mol_type = other DNA
aggccaccagcagcgcgcgc

SEQ ID NO: 1070 - DNA, 20 bp, synthetic construct
  source 1..20: mol_type = other DNA
ggttctagaagtcagacttt

SEQ ID NO: 1071 - DNA, 20 bp, synthetic construct
  source 1..20: mol_type = other DNA
gaggcgagaagaccttgctg

SEQ ID NO: 1072 - DNA, 20 bp, synthetic construct
  source 1..20: mol_type = other DNA
acccctcagtatttacccaa

SEQ ID NO: 1073 - DNA, 20 bp, synthetic construct
  source 1..20: mol_type = other DNA
cactccatacccagagaagc

SEQ ID NO: 1074 - DNA, 20 bp, synthetic construct
  source 1..20: mol_type = other DNA
gctgttgagccctcagcagc

SEQ ID NO: 1075 - DNA, 20 bp, synthetic construct
  source 1..20: mol_type = other DNA
ccctccccccagtttcctaa

SEQ ID NO: 1076 - DNA, 20 bp, synthetic construct
  source 1..20: mol_type = other DNA
ctaatggtgttgtttaaaaa

SEQ ID NO: 1077 - DNA, 20 bp, synthetic construct
  source 1..20: mol_type = other DNA
tcaggggacgggggaacaga

SEQ ID NO: 1078 - DNA, 20 bp, synthetic construct
  source 1..20: mol_type = other DNA
tgccatgctgccttcagagc

SEQ ID NO: 1079 - DNA, 20 bp, synthetic construct
  source 1..20: mol_type = other DNA
gcggccccagagctggcggg

SEQ ID NO: 1080 - DNA, 20 bp, synthetic construct
  source 1..20: mol_type = other DNA
gctcccgcgcgcgctgctgg

SEQ ID NO: 1081 - DNA, 20 bp, synthetic construct
  source 1..20: mol_type = other DNA
gttctagaagtcagactttc

SEQ ID NO: 1082 - DNA, 20 bp, synthetic construct
  source 1..20: mol_type = other DNA
aaggtcttctcgcctccctt

SEQ ID NO: 1083 - DNA, 20 bp, synthetic construct
  source 1..20: mol_type = other DNA
atactgaggggtgcctctgc

SEQ ID NO: 1084 - DNA, 20 bp, synthetic construct
  source 1..20: mol_type = other DNA
actccatacccagagaagca

SEQ ID NO: 1085 - DNA, 20 bp, synthetic construct
  source 1..20: mol_type = other DNA
ctgttgagccctcagcagct

SEQ ID NO: 1086 - DNA, 20 bp, synthetic construct
  source 1..20: mol_type = other DNA
accattaggaaactgggggg

SEQ ID NO: 1087 - DNA, 20 bp, synthetic construct
  source 1..20: mol_type = other DNA
ggtgttgtttaaaaagggtc

SEQ ID NO: 1088 - DNA, 20 bp, synthetic construct
  source 1..20: mol_type = other DNA
ggggacgggggaacagatgg

SEQ ID NO: 1089 - DNA, 20 bp, synthetic construct
  source 1..20: mol_type = other DNA
cggggaggtaggatgaccag

SEQ ID NO: 1090 - DNA, 20 bp, synthetic construct
  source 1..20: mol_type = other DNA
cggccccagagctggcggga

SEQ ID NO: 1091 - DNA, 20 bp, synthetic construct
  source 1..20: mol_type = other DNA
cgcgggagcccggggaacag

SEQ ID NO: 1092 - DNA, 20 bp, synthetic construct
  source 1..20: mol_type = other DNA
gtcactaactctcagcatgc

SEQ ID NO: 1093 - DNA, 20 bp, synthetic construct
  source 1..20: mol_type = other DNA
aggtcttctcgcctcccttt

SEQ ID NO: 1094 - DNA, 20 bp, synthetic construct
  source 1..20: mol_type = other DNA
tgaggggtgcctctgcagga

SEQ ID NO: 1095 - DNA, 20 bp, synthetic construct
  source 1..20: mol_type = other DNA
tttccctgcttctctgggta

SEQ ID NO: 1096 - DNA, 20 bp, synthetic construct
  source 1..20: mol_type = other DNA
tgttgagccctcagcagctg

SEQ ID NO: 1097 - DNA, 20 bp, synthetic construct
  source 1..20: mol_type = other DNA
aacaccattaggaaactggg

SEQ ID NO: 1098 - DNA, 20 bp, synthetic construct
  source 1..20: mol_type = other DNA
gtgttgtttaaaaagggtca

SEQ ID NO: 1099 - DNA, 20 bp, synthetic construct
  source 1..20: mol_type = other DNA
gggacgggggaacagatggt

SEQ ID NO: 1100 - DNA, 20 bp, synthetic construct
  source 1..20: mol_type = other DNA
gtctgtggcagctcgtccgc

SEQ ID NO: 1101 - DNA, 20 bp, synthetic construct
  source 1..20: mol_type = other DNA
tctccctcccgccagctctg

SEQ ID NO: 1102 - DNA, 20 bp, synthetic construct
  source 1..20: mol_type = other DNA
ggagcccggggaacagcggt

SEQ ID NO: 1103 - DNA, 20 bp, synthetic construct
  source 1..20: mol_type = other DNA
taactctcagcatgctggcc

SEQ ID NO: 1104 - DNA, 20 bp, synthetic construct
  source 1..20: mol_type = other DNA
ctcagtatttacccaaaggg

SEQ ID NO: 1105 - DNA, 20 bp, synthetic construct
  source 1..20: mol_type = other DNA
gaggggtgcctctgcaggac

SEQ ID NO: 1106 - DNA, 20 bp, synthetic construct
  source 1..20: mol_type = other DNA
tttggtttccctgcttctct

SEQ ID NO: 1107 - DNA, 20 bp, synthetic construct
  source 1..20: mol_type = other DNA
cagctctccccagctgctga

SEQ ID NO: 1108 - DNA, 20 bp, synthetic construct
  source 1..20: mol_type = other DNA
caacaccattaggaaactgg

SEQ ID NO: 1109 - DNA, 20 bp, synthetic construct
  source 1..20: mol_type = other DNA
tgttgtttaaaaagggtcag

SEQ ID NO: 1110 - DNA, 20 bp, synthetic construct
  source 1..20: mol_type = other DNA
aagagcacagtgcagacacc

SEQ ID NO: 1111 - DNA, 20 bp, synthetic construct
  source 1..20: mol_type = other DNA
gagctgccacagacttgccg

SEQ ID NO: 1112 - DNA, 20 bp, synthetic construct
  source 1..20: mol_type = other DNA
ctctccctcccgccagctct

SEQ ID NO: 1113 - DNA, 20 bp, synthetic construct
  source 1..20: mol_type = other DNA
gtcacctaccgctgttcccc

SEQ ID NO: 1114 - DNA, 20 bp, synthetic construct
  source 1..20: mol_type = other DNA
ctcagcatgctggcctggct

SEQ ID NO: 1115 - DNA, 20 bp, synthetic construct
  source 1..20: mol_type = other DNA
ctccctttgggtaaatactg

SEQ ID NO: 1116 - DNA, 20 bp, synthetic construct
  source 1..20: mol_type = other DNA
gcagaggtcccgtcctgcag

SEQ ID NO: 1117 - DNA, 20 bp, synthetic construct
  source 1..20: mol_type = other DNA
agaagcagggaaaccaaaat

SEQ ID NO: 1118 - DNA, 20 bp, synthetic construct
  source 1..20: mol_type = other DNA
ccagctctccccagctgctg

SEQ ID NO: 1119 - DNA, 20 bp, synthetic construct
  source 1..20: mol_type = other DNA
acaacaccattaggaaactg

SEQ ID NO: 1120 - DNA, 20 bp, synthetic construct
  source 1..20: mol_type = other DNA
gtttaaaaagggtcagggga

SEQ ID NO: 1121 - DNA, 20 bp, synthetic construct
  source 1..20: mol_type = other DNA
acagtgcagacacctggcac

SEQ ID NO: 1122 - DNA, 20 bp, synthetic construct
  source 1..20: mol_type = other DNA
acttgccgcggccccagagc

SEQ ID NO: 1123 - DNA, 20 bp, synthetic construct
  source 1..20: mol_type = other DNA
ccagagctggcgggagggag

SEQ ID NO: 1124 - DNA, 20 bp, synthetic construct
  source 1..20: mol_type = other DNA
gcctggctcggcccacagca

SEQ ID NO: 1125 - DNA, 20 bp, synthetic construct
  source 1..20: mol_type = other DNA
tccctttgggtaaatactga

SEQ ID NO: 1126 - DNA, 20 bp, synthetic construct
  source 1..20: mol_type = other DNA
tatggagtggagtctggcag

SEQ ID NO: 1127 - DNA, 20 bp, synthetic construct
  source 1..20: mol_type = other DNA
ctcaaggctgactccaattt

SEQ ID NO: 1128 - DNA, 20 bp, synthetic construct
  source 1..20: mol_type = other DNA
cctcagcagctggggagagc

SEQ ID NO: 1129 - DNA, 20 bp, synthetic construct
  source 1..20: mol_type = other DNA
aacaacaccattaggaaact

SEQ ID NO: 1130 - DNA, 20 bp, synthetic construct
  source 1..20: mol_type = other DNA
tttaaaaagggtcaggggac

SEQ ID NO: 1131 - DNA, 20 bp, synthetic construct
  source 1..20: mol_type = other DNA
acacctggcaccggctctga

SEQ ID NO: 1132 - DNA, 20 bp, synthetic construct
  source 1..20: mol_type = other DNA
tgccgcggccccagagctgg

SEQ ID NO: 1133 - DNA, 20 bp, synthetic construct
  source 1..20: mol_type = other DNA
cctctccctcccgccagctc

SEQ ID NO: 1134 - DNA, 20 bp, synthetic construct
  source 1..20: mol_type = other DNA
ggtcacctaccgctgttccc

SEQ ID NO: 1135 - DNA, 20 bp, synthetic construct
  source 1..20: mol_type = other DNA
cagagtcgttgcggggatgc

SEQ ID NO: 1136 - DNA, 20 bp, synthetic construct
  source 1..20: mol_type = other DNA
ggagccgggaacccggagct

SEQ ID NO: 1137 - DNA, 20 bp, synthetic construct
  source 1..20: mol_type = other DNA
aggggttacagaggagactt

SEQ ID NO: 1138 - DNA, 20 bp, synthetic construct
  source 1..20: mol_type = other DNA
atccccgcaacgactctgcg

SEQ ID NO: 1139 - DNA, 20 bp, synthetic construct
  source 1..20: mol_type = other DNA
caagccaagctccgggttcc

SEQ ID NO: 1140 - DNA, 20 bp, synthetic construct
  source 1..20: mol_type = other DNA
agtctcctctgtaaccccta

SEQ ID NO: 1141 - DNA, 20 bp, synthetic construct
  source 1..20: mol_type = other DNA
tccccgcaacgactctgcgc

SEQ ID NO: 1142 - DNA, 20 bp, synthetic construct
  source 1..20: mol_type = other DNA
ggcacagcaagccaagctcc

SEQ ID NO: 1143 - DNA, 20 bp, synthetic construct
  source 1..20: mol_type = other DNA
tcctctgtaacccctaaggt

SEQ ID NO: 1144 - DNA, 20 bp, synthetic construct
  source 1..20: mol_type = other DNA
aacgactctgcgcgggaacc

SEQ ID NO: 1145 - DNA, 20 bp, synthetic construct
  source 1..20: mol_type = other DNA
gggcacagcaagccaagctc

SEQ ID NO: 1146 - DNA, 20 bp, synthetic construct
  source 1..20: mol_type = other DNA
cccgaccttaggggttacag

SEQ ID NO: 1147 - DNA, 20 bp, synthetic construct
  source 1..20: mol_type = other DNA
tctgcgcgggaaccaggagc

SEQ ID NO: 1148 - DNA, 20 bp, synthetic construct
  source 1..20: mol_type = other DNA
gcttgctgtgcccagagctc

SEQ ID NO: 1149 - DNA, 20 bp, synthetic construct
  source 1..20: mol_type = other DNA
cctctgtaacccctaaggtc

SEQ ID NO: 1150 - DNA, 20 bp, synthetic construct
  source 1..20: mol_type = other DNA
ctgcgcgggaaccaggagcc

SEQ ID NO: 1151 - DNA, 20 bp, synthetic construct
  source 1..20: mol_type = other DNA
gctggaaacgaggtgtttcc

SEQ ID NO: 1152 - DNA, 20 bp, synthetic construct
  source 1..20: mol_type = other DNA
ggaaccaggagccgggaacc

SEQ ID NO: 1153 - DNA, 20 bp, synthetic construct
  source 1..20: mol_type = other DNA
ttgcggggatgctggaaacg

SEQ ID NO: 1154 - DNA, 20 bp, synthetic construct
  source 1..20: mol_type = other DNA
agctccgggttcccggctcc

SEQ ID NO: 1155 - DNA, 20 bp, synthetic construct
  source 1..20: mol_type = other DNA
agagtctctcagctggtaca

SEQ ID NO: 1156 - DNA, 20 bp, synthetic construct
  source 1..20: mol_type = other DNA
aggaaacagaggtttgccgg

SEQ ID NO: 1157 - DNA, 20 bp, synthetic construct
  source 1..20: mol_type = other DNA
aggaggaaacagaggtttgc

SEQ ID NO: 1158 - DNA, 20 bp, synthetic construct
  source 1..20: mol_type = other DNA
acctctgtttcctcctcaaa

SEQ ID NO: 1159 - DNA, 20 bp, synthetic construct
  source 1..20: mol_type = other DNA
gccttttgaggaggaaacag

SEQ ID NO: 1160 - DNA, 20 bp, synthetic construct
  source 1..20: mol_type = other DNA
cgacctcctgccttttgagg

SEQ ID NO: 1161 - DNA, 20 bp, synthetic construct
  source 1..20: mol_type = other DNA
ttccgacctcctgccttttg

SEQ ID NO: 1162 - DNA, 20 bp, synthetic construct
  source 1..20: mol_type = other DNA
tcattcttcagtatttccgt

SEQ ID NO: 1163 - DNA, 20 bp, synthetic construct
  source 1..20: mol_type = other DNA
aagaatgagtctcagcacta

SEQ ID NO: 1164 - DNA, 20 bp, synthetic construct
  source 1..20: mol_type = other DNA
cagaaagcaggagctgctgg

SEQ ID NO: 1165 - DNA, 20 bp, synthetic construct
  source 1..20: mol_type = other DNA
cctcagaaagcaggagctgc

SEQ ID NO: 1166 - DNA, 20 bp, synthetic construct
  source 1..20: mol_type = other DNA
ccagcagctcctgctttctg

SEQ ID NO: 1167 - DNA, 20 bp, synthetic construct
  source 1..20: mol_type = other DNA
cagcagctcctgctttctga

SEQ ID NO: 1168 - DNA, 20 bp, synthetic construct
  source 1..20: mol_type = other DNA
ctcctgctttctgagggtga

SEQ ID NO: 1169 - DNA, 20 bp, synthetic construct
  source 1..20: mol_type = other DNA
atccttcaccctcagaaagc

SEQ ID NO: 1170 - DNA, 20 bp, synthetic construct
  source 1..20: mol_type = other DNA
agggtgaaggatagacgctg

SEQ ID NO: 1171 - DNA, 20 bp, synthetic construct
  source 1..20: mol_type = other DNA
gactcactagcactctatca

SEQ ID NO: 1172 - DNA, 20 bp, synthetic construct
  source 1..20: mol_type = other DNA
actctatcacggccatattc

SEQ ID NO: 1173 - DNA, 20 bp, synthetic construct
  source 1..20: mol_type = other DNA
tatcacggccatattctggc

SEQ ID NO: 1174 - DNA, 20 bp, synthetic construct
  source 1..20: mol_type = other DNA
atcacggccatattctggca

SEQ ID NO: 1175 - DNA, 20 bp, synthetic construct
  source 1..20: mol_type = other DNA
ccactgaccctgccagaata

SEQ ID NO: 1176 - DNA, 20 bp, synthetic construct
  source 1..20: mol_type = other DNA
ccatattctggcagggtcag

SEQ ID NO: 1177 - DNA, 20 bp, synthetic construct
  source 1..20: mol_type = other DNA
ggctccaactaacatttgtt

SEQ ID NO: 1178 - DNA, 20 bp, synthetic construct
  source 1..20: mol_type = other DNA
agtaccaaacaaatgttagt

SEQ ID NO: 1179 - DNA, 20 bp, synthetic construct
  source 1..20: mol_type = other DNA
ttattaaatagatgtttata

SEQ ID NO: 1180 - DNA, 20 bp, synthetic construct
  source 1..20: mol_type = other DNA
atttctttctcagaagagcc

SEQ ID NO: 1181 - DNA, 20 bp, synthetic construct
  source 1..20: mol_type = other DNA
tttctcagaagagcctggct

SEQ ID NO: 1182 - DNA, 20 bp, synthetic construct
  source 1..20: mol_type = other DNA
tcagaagagcctggctagga

SEQ ID NO: 1183 - DNA, 20 bp, synthetic construct
  source 1..20: mol_type = other DNA
gaagagcctggctaggaagg

SEQ ID NO: 1184 - DNA, 20 bp, synthetic construct
  source 1..20: mol_type = other DNA
cctcatccaccttcctagcc

SEQ ID NO: 1185 - DNA, 20 bp, synthetic construct
  source 1..20: mol_type = other DNA
cctggctaggaaggtggatg

SEQ ID NO: 1186 - DNA, 20 bp, synthetic construct
  source 1..20: mol_type = other DNA
aggcaccatattcattttgc

SEQ ID NO: 1187 - DNA, 20 bp, synthetic construct
  source 1..20: mol_type = other DNA
ggtgaaattcctgagatgta

SEQ ID NO: 1188 - DNA, 20 bp, synthetic construct
  source 1..20: mol_type = other DNA
acagcagctccttacatctc

SEQ ID NO: 1189 - DNA, 20 bp, synthetic construct
  source 1..20: mol_type = other DNA
gagctgctgtgacttgctca

SEQ ID NO: 1190 - DNA, 20 bp, synthetic construct
  source 1..20: mol_type = other DNA
aaggccttatatcgagtaaa

SEQ ID NO: 1191 - DNA, 20 bp, synthetic construct
  source 1..20: mol_type = other DNA
actaccgtttactcgatata

SEQ ID NO: 1192 - DNA, 20 bp, synthetic construct
  source 1..20: mol_type = other DNA
tatcgagtaaacggtagtgc

SEQ ID NO: 1193 - DNA, 20 bp, synthetic construct
  source 1..20: mol_type = other DNA
atcgagtaaacggtagtgct

SEQ ID NO: 1194 - DNA, 20 bp, synthetic construct
  source 1..20: mol_type = other DNA
tcgagtaaacggtagtgctg

SEQ ID NO: 1195 - DNA, 20 bp, synthetic construct
  source 1..20: mol_type = other DNA
tagtgctggggcttagacgc

SEQ ID NO: 1196 - DNA, 20 bp, synthetic construct
  source 1..20: mol_type = other DNA
gattgctctctcattgatag

SEQ ID NO: 1197 - DNA, 20 bp, synthetic construct
  source 1..20: mol_type = other DNA
tcaatgagagagcaatctcc

SEQ ID NO: 1198 - DNA, 20 bp, synthetic construct
  source 1..20: mol_type = other DNA
gggaaatctatcacattacc

SEQ ID NO: 1199 - DNA, 20 bp, synthetic construct
  source 1..20: mol_type = other DNA
tggtatgttggcattaagtt

SEQ ID NO: 1200 - DNA, 20 bp, synthetic construct
  source 1..20: mol_type = other DNA
atggtatgttggcattaagt

SEQ ID NO: 1201 - DNA, 20 bp, synthetic construct
  source 1..20: mol_type = other DNA
atgggaggtttatggtatgt

SEQ ID NO: 1202 - DNA, 20 bp, synthetic construct
  source 1..20: mol_type = other DNA
ttagcagaatgggaggttta

SEQ ID NO: 1203 - DNA, 20 bp, synthetic construct
  source 1..20: mol_type = other DNA
ctgggcattagcagaatggg

SEQ ID NO: 1204 - DNA, 20 bp, synthetic construct
  source 1..20: mol_type = other DNA
aggctgggcattagcagaat

SEQ ID NO: 1205 - DNA, 20 bp, synthetic construct
  source 1..20: mol_type = other DNA
taggctgggcattagcagaa

SEQ ID NO: 1206 - DNA, 20 bp, synthetic construct
  source 1..20: mol_type = other DNA
tgctaatgcccagcctaagt

SEQ ID NO: 1207 - DNA, 20 bp, synthetic construct
  source 1..20: mol_type = other DNA
gctaatgcccagcctaagtt

SEQ ID NO: 1208 - DNA, 20 bp, synthetic construct
  source 1..20: mol_type = other DNA
ctaatgcccagcctaagttg

SEQ ID NO: 1209 - DNA, 20 bp, synthetic construct
  source 1..20: mol_type = other DNA
tggtctccccaacttaggct

SEQ ID NO: 1210 - DNA, 20 bp, synthetic construct
  source 1..20: mol_type = other DNA
gtggtctccccaacttaggc

SEQ ID NO: 1211 - DNA, 20 bp, synthetic construct
  source 1..20: mol_type = other DNA
tggagtggtctccccaactt

SEQ ID NO: 1212 - DNA, 20 bp, synthetic construct
  source 1..20: mol_type = other DNA
gtacatcttggaatctggag

SEQ ID NO: 1213 - DNA, 20 bp, synthetic construct
  source 1..20: mol_type = other DNA
aaactgtacatcttggaatc

SEQ ID NO: 1214 - DNA, 20 bp, synthetic construct
  source 1..20: mol_type = other DNA
gcaaagcaaactgtacatct

SEQ ID NO: 1215 - DNA, 20 bp, synthetic construct
  source 1..20: mol_type = other DNA
agatgtacagtttgctttgc

SEQ ID NO: 1216 - DNA, 20 bp, synthetic construct
  source 1..20: mol_type = other DNA
gatgtacagtttgctttgct

SEQ ID NO: 1217 - DNA, 20 bp, synthetic construct
  source 1..20: mol_type = other DNA
ggcagagtaaaggcaggcat

SEQ ID NO: 1218 - DNA, 20 bp, synthetic construct
  source 1..20: mol_type = other DNA
tggcagagtaaaggcaggca

SEQ ID NO: 1219 - DNA, 1001 bp, Homo sapiens
  source 1..1001: mol_type = genomic DNA
tgtgatagatttcccaacttaatgccaacataccataaacctcccattctgctaatgcccagcctaagttggggagaccactccagattccaagatgtacagtttgctttgctgggcctttttcccatgcctgcctttactctgccagagttatattgctggggttttgaagaagatcctattaaataaaagaataagcagtattattaagtagccctgcatttcaggtttccttgagtggcaggccaggcctggccgtgaacgttcactgaaatcatggcctcttggccaagattgatagcttgtgcctgtccctgagtcccagtccatcacgagcagctggtttctaagatgctatttcccgtataaagcatgagaccgtgacttgccagccccacagagccccgcccttgtccatcactggcatctggactccagcctgggttggggcaaagagggaaatgagatcatgtcctaaccctgatcctcttgtcccacagatatccagaaccctgaccctgccgtgtaccagctgagagactctaaatccagtgacaagtctgtctgcctattcaccgattttgattctcaaacaaatgtgtcacaaagtaaggattctgatgtgtatatcacagacaaaactgtgctagacatgaggtctatggacttcaagagcaacagtgctgtggcctggagcaacaaatctgactttgcatgtgcaaacgccttcaacaacagcattattccagaagacaccttcttccccagcccaggtaagggcagctttggtgccttcgcaggctgtttccttgcttcaggaatggccaggttctgcccagagctctggtcaatgatgtctaaaactcctctgattggtggtctcggccttatccattgccaccaaaaccctctttttactaagaaacagtgagccttgttctggcagtccagagaatgacacgggaaaaaagcagatgaagagaaggtggcaggagagggca

SEQ ID NO: 1220 - DNA, 2001 bp, Homo sapiens
  source 1..2001: mol_type = genomic DNA
catgctaatcctccggcaaacctctgtttcctcctcaaaaggcaggaggtcggaaagaataaacaatgagagtcacattaaaaacacaaaatcctacggaaatactgaagaatgagtctcagcactaaggaaaagcctccagcagctcctgctttctgagggtgaaggatagacgctgtggctctgcatgactcactagcactctatcacggccatattctggcagggtcagtggctccaactaacatttgtttggtactttacagtttattaaatagatgtttatatggagaagctctcatttctttctcagaagagcctggctaggaaggtggatgaggcaccatattcattttgcaggtgaaattcctgagatgtaaggagctgctgtgacttgctcaaggccttatatcgagtaaacggtagtgctggggcttagacgcaggtgttctgatttatagttcaaaacctctatcaatgagagagcaatctcctggtaatgtgatagatttcccaacttaatgccaacataccataaacctcccattctgctaatgcccagcctaagttggggagaccactccagattccaagatgtacagtttgctttgctgggcctttttcccatgcctgcctttactctgccagagttatattgctggggttttgaagaagatcctattaaataaaagaataagcagtattattaagtagccctgcatttcaggtttccttgagtggcaggccaggcctggccgtgaacgttcactgaaatcatggcctcttggccaagattgatagcttgtgcctgtccctgagtcccagtccatcacgagcagctggtttctaagatgctatttcccgtataaagcatgagaccgtgacttgccagccccacagagccccgcccttgtccatcactggcatctggactccagcctgggttggggcaaagagggaaatgagatcatgtcctaaccctgatcctcttgtcccacagatatccagaaccctgaccctgccgtgtaccagctgagagactctaaatccagtgacaagtctgtctgcctattcaccgattttgattctcaaacaaatgtgtcacaaagtaaggattctgatgtgtatatcacagacaaaactgtgctagacatgaggtctatggacttcaagagcaacagtgctgtggcctggagcaacaaatctgactttgcatgtgcaaacgccttcaacaacagcattattccagaagacaccttcttccccagcccaggtaagggcagctttggtgccttcgcaggctgtttccttgcttcaggaatggccaggttctgcccagagctctggtcaatgatgtctaaaactcctctgattggtggtctcggccttatccattgccaccaaaaccctctttttactaagaaacagtgagccttgttctggcagtccagagaatgacacgggaaaaaagcagatgaagagaaggtggcaggagagggcacgtggcccagcctcagtctctccaactgagttcctgcctgcctgcctttgctcagactgtttgccccttactgctcttctaggcctcattctaagccccttctccaagttgcctctccttatttctccctgtctgccaaaaaatctttcccagctcactaagtcagtctcacgcagtcactcattaacccaccaatcactgattgtgccggcacatgaatgcaccaggtgttgaagtggaggaattaaaaagtcagatgaggggtgtgcccagaggaagcaccattctagttgggggagcccatctgtcagctgggaaaagtccaaataacttcagattggaatgtgttttaactcagggttgagaaaacagctaccttcaggacaaaagtcagggaagggctctctgaagaaatgctacttgaagataccagccctaccaagggcagggagaggaccctatagaggcctgggacaggagctcaatgagaaaggagaaga

SEQ ID NO: 1221 - DNA, 20 bp, synthetic construct
  source 1..20: mol_type = other DNA
aactctggcagagtaaaggc

SEQ ID NO: 1222 - DNA, 20 bp, synthetic construct
  source 1..20: mol_type = other DNA
atataactctggcagagtaa

SEQ ID NO: 1223 - DNA, 20 bp, synthetic construct
  source 1..20: mol_type = other DNA
ctctgccagagttatattgc

SEQ ID NO: 1224 - DNA, 20 bp, synthetic construct
  source 1..20: mol_type = other DNA
tctgccagagttatattgct

SEQ ID NO: 1225 - DNA, 20 bp, synthetic construct
  source 1..20: mol_type = other DNA
ctgccagagttatattgctg

SEQ ID NO: 1226 - DNA, 20 bp, synthetic construct
  source 1..20: mol_type = other DNA
aaaccccagcaatataactc

SEQ ID NO: 1227 - DNA, 20 bp, synthetic construct
  source 1..20: mol_type = other DNA
tgcttattcttttatttaat

SEQ ID NO: 1228 - DNA, 20 bp, synthetic construct
  source 1..20: mol_type = other DNA
attaagtagccctgcatttc

SEQ ID NO: 1229 - DNA, 20 bp, synthetic construct
  source 1..20: mol_type = other DNA
tcaaggaaacctgaaatgca

SEQ ID NO: 1230 - DNA, 20 bp, synthetic construct
  source 1..20: mol_type = other DNA
ctcaaggaaacctgaaatgc

SEQ ID NO: 1231 - DNA, 20 bp, synthetic construct
  source 1..20: mol_type = other DNA
gcatttcaggtttccttgag

SEQ ID NO: 1232 - DNA, 20 bp, synthetic construct
  source 1..20: mol_type = other DNA
ttcaggtttccttgagtggc

SEQ ID NO: 1233 - DNA, 20 bp, synthetic construct
  source 1..20: mol_type = other DNA
gtttccttgagtggcaggcc

SEQ ID NO: 1234 - DNA, 20 bp, synthetic construct
  source 1..20: mol_type = other DNA
caggcctggcctgccactca

SEQ ID NO: 1235 - DNA, 20 bp, synthetic construct
  source 1..20: mol_type = other DNA
cttgagtggcaggccaggcc

SEQ ID NO: 1236 - DNA, 20 bp, synthetic construct
  source 1..20: mol_type = other DNA
tgaacgttcacggccaggcc

SEQ ID NO: 1237 - DNA, 20 bp, synthetic construct
  source 1..20: mol_type = other DNA
ttcagtgaacgttcacggcc

SEQ ID NO: 1238 - DNA, 20 bp, synthetic construct
  source 1..20: mol_type = other DNA
atgatttcagtgaacgttca

SEQ ID NO: 1239 - DNA, 20 bp, synthetic construct
  source 1..20: mol_type = other DNA
tcactgaaatcatggcctct

SEQ ID NO: 1240 - DNA, 20 bp, synthetic construct
  source 1..20: mol_type = other DNA
agctatcaatcttggccaag

SEQ ID NO: 1241 - DNA, 20 bp, synthetic construct
  source 1..20: mol_type = other DNA
caggcacaagctatcaatct

SEQ ID NO: 1242 - DNA, 20 bp, synthetic construct
  source 1..20: mol_type = other DNA
atggactgggactcagggac

SEQ ID NO: 1243 - DNA, 20 bp, synthetic construct
  source 1..20: mol_type = other DNA
tcgtgatggactgggactca

SEQ ID NO: 1244 - DNA, 20 bp, synthetic construct
  source 1..20: mol_type = other DNA
ctcgtgatggactgggactc

SEQ ID NO: 1245 - DNA, 20 bp, synthetic construct
  source 1..20: mol_type = other DNA
ccagctgctcgtgatggact

SEQ ID NO: 1246 - DNA, 20 bp, synthetic construct
  source 1..20: mol_type = other DNA
cccagtccatcacgagcagc

SEQ ID NO: 1247 - DNA, 20 bp, synthetic construct
  source 1..20: mol_type = other DNA
accagctgctcgtgatggac

SEQ ID NO: 1248 - DNA, 20 bp, synthetic construct
  source 1..20: mol_type = other DNA
tagaaaccagctgctcgtga

SEQ ID NO: 1249 - DNA, 20 bp, synthetic construct
  source 1..20: mol_type = other DNA
cacggtctcatgctttatac

SEQ ID NO: 1250 - DNA, 20 bp, synthetic construct
  source 1..20: mol_type = other DNA
tcacggtctcatgctttata

SEQ ID NO: 1251 - DNA, 20 bp, synthetic construct
  source 1..20: mol_type = other DNA
tctgtggggctggcaagtca

SEQ ID NO: 1252 - DNA, 20 bp, synthetic construct
  source 1..20: mol_type = other DNA
agggcggggctctgtggggc

SEQ ID NO: 1253 - DNA, 20 bp, synthetic construct
  source 1..20: mol_type = other DNA
gacaagggcggggctctgtg

SEQ ID NO: 1254 - DNA, 20 bp, synthetic construct
  source 1..20: mol_type = other DNA
tggacaagggcggggctctg

SEQ ID NO: 1255 - DNA, 20 bp, synthetic construct
  source 1..20: mol_type = other DNA
gccccgcccttgtccatcac

SEQ ID NO: 1256 - DNA, 20 bp, synthetic construct
  source 1..20: mol_type = other DNA
gccagtgatggacaagggcg

SEQ ID NO: 1257 - DNA, 20 bp, synthetic construct
  source 1..20: mol_type = other DNA
tgccagtgatggacaagggc

SEQ ID NO: 1258 - DNA, 20 bp, synthetic construct
  source 1..20: mol_type = other DNA
atgccagtgatggacaaggg

SEQ ID NO: 1259 - DNA, 20 bp, synthetic construct
  source 1..20: mol_type = other DNA
cagatgccagtgatggacaa

SEQ ID NO: 1260 - DNA, 20 bp, synthetic construct
  source 1..20: mol_type = other DNA
ccagatgccagtgatggaca

SEQ ID NO: 1261 - DNA, 20 bp, synthetic construct
  source 1..20: mol_type = other DNA
ccttgtccatcactggcatc

SEQ ID NO: 1262 - DNA, 20 bp, synthetic construct
  source 1..20: mol_type = other DNA
tggagtccagatgccagtga

SEQ ID NO: 1263 - DNA, 20 bp, synthetic construct
  source 1..20: mol_type = other DNA
ctggcatctggactccagcc

SEQ ID NO: 1264 - DNA, 20 bp, synthetic construct
  source 1..20: mol_type = other DNA
tggcatctggactccagcct

SEQ ID NO: 1265 - DNA, 20 bp, synthetic construct
  source 1..20: mol_type = other DNA
atctggactccagcctgggt

SEQ ID NO: 1266 - DNA, 20 bp, synthetic construct
  source 1..20: mol_type = other DNA
ctggactccagcctgggttg

SEQ ID NO: 1267 - DNA, 20 bp, synthetic construct
  source 1..20: mol_type = other DNA
ctctttgccccaacccaggc

SEQ ID NO: 1268 - DNA, 20 bp, synthetic construct
  source 1..20: mol_type = other DNA
cagcctgggttggggcaaag

SEQ ID NO: 1269 - DNA, 20 bp, synthetic construct
  source 1..20: mol_type = other DNA
agcctgggttggggcaaaga

SEQ ID NO: 1270 - DNA, 20 bp, synthetic construct
  source 1..20: mol_type = other DNA
ttccctctttgccccaaccc

SEQ ID NO: 1271 - DNA, 20 bp, synthetic construct
  source 1..20: mol_type = other DNA
tctgtgggacaagaggatca

SEQ ID NO: 1272 - DNA, 20 bp, synthetic construct
  source 1..20: mol_type = other DNA
atctgtgggacaagaggatc

SEQ ID NO: 1273 - DNA, 20 bp, synthetic construct
  source 1..20: mol_type = other DNA
ctggatatctgtgggacaag

SEQ ID NO: 1274 - DNA, 20 bp, synthetic construct
  source 1..20: mol_type = other DNA
tcagggttctggatatctgt

SEQ ID NO: 1275 - DNA, 20 bp, synthetic construct
  source 1..20: mol_type = other DNA
gtcagggttctggatatctg

SEQ ID NO: 1276 - DNA, 20 bp, synthetic construct
  source 1..20: mol_type = other DNA
acacggcagggtcagggttc

SEQ ID NO: 1277 - DNA, 20 bp, synthetic construct
  source 1..20: mol_type = other DNA
agctggtacacggcagggtc

SEQ ID NO: 1278 - DNA, 20 bp, synthetic construct
  source 1..20: mol_type = other DNA
ctctcagctggtacacggca

SEQ ID NO: 1279 - DNA, 20 bp, synthetic construct
  source 1..20: mol_type = other DNA
tctctcagctggtacacggc

SEQ ID NO: 1280 - DNA, 20 bp, synthetic construct
  source 1..20: mol_type = other DNA
tggatttagagtctctcagc

SEQ ID NO: 1281 - DNA, 20 bp, synthetic construct
  source 1..20: mol_type = other DNA
aacaaatgtgtcacaaagta

SEQ ID NO: 1282 - DNA, 20 bp, synthetic construct
  source 1..20: mol_type = other DNA
cttcaagagcaacagtgctg

SEQ ID NO: 1283 - DNA, 1001 bp, Homo sapiens
  source 1..1001: mol_type = genomic DNA
tacccagagaatggagaaaccctgcagggaattcccaagctgtagttataaacagaagttctccttctgctaggtagcattcaaagatcttaatcttctgggtttccgttttctcgaatgaaaaatgcaggtccgagcagttaactggctggggcaccattagcaagtcacttagcatctctggggccagtctgcaaagcgagggggcagccttaatgtgcctccagcctgaagtcctagaatgagcgcccggtgtcccaagctggggcgcgcaccccagatcggagggcgccgatgtacagacagcaaactcacccagtctagtgcatgccttcttaaacatcacgagactctaagaaaaggaaactgaaaacgggaaagtccctctctctaacctggcactgcgtcgctggcttggagacaggtgacggtccctgcgggccttgtcctgattggctgggcacgcgtttaatataagtggaggcgtcgcgctggcgggcattcctgaagctgacagcattcgggccgagatgtctcgctccgtggccttagctgtgctcgcgctactctctctttctggcctggaggctatccagcgtgagtctctcctaccctcccgctctggtccttcctctcccgctctgcaccctctgtggccctcgctgtgctctctcgctccgtgacttcccttctccaagttctccttggtggcccgccgtggggctagtccagggctggatctcggggaagcggcggggtggcctgggagtggggaagggggtgcgcacccgggacgcgcgctacttgcccctttcggcggggagcaggggagacctttggcctacggcgacgggagggtcgggacaaagtttagggcgtcgataagcgtcagagcgccgaggttgggggagggtttctcttccgctctttcgcggggcctctggctcccccagcgcagctggagtgggggacgggtaggctcgtcccaaaggcgcggcgct

SEQ ID NO: 1284 - DNA, 2001 bp, Homo sapiens
  source 1..2001: mol_type = genomic DNA
gagccctttgtcttccagtgtctaaaatattaatgtcaatggaatcaggccagagtttgaattctagtctcttagcctttgtttcccctgtccataaaatgaatgggggtaattctttcctcctacagtttatttatatattcactaattcattcattcatccatccattcgttcattcggtttactgagtacctactatgtgccagcccctgttctagggtggaaactaagagaatgatgtacctagagggcgctggaagctctaaagccctagcagttactgcttttactattagtggtcgtttttttctcccccccgccccccgacaaatcaacagaacaaagaaaattacctaaacagcaaggacatagggaggaacttcttggcacagaactttccaaacactttttcctgaagggatacaagaagcaagaaaggtactctttcactaggaccttctctgagctgtcctcaggatgcttttgggactatttttcttacccagagaatggagaaaccctgcagggaattcccaagctgtagttataaacagaagttctccttctgctaggtagcattcaaagatcttaatcttctgggtttccgttttctcgaatgaaaaatgcaggtccgagcagttaactggctggggcaccattagcaagtcacttagcatctctggggccagtctgcaaagcgagggggcagccttaatgtgcctccagcctgaagtcctagaatgagcgcccggtgtcccaagctggggcgcgcaccccagatcggagggcgccgatgtacagacagcaaactcacccagtctagtgcatgccttcttaaacatcacgagactctaagaaaaggaaactgaaaacgggaaagtccctctctctaacctggcactgcgtcgctggcttggagacaggtgacggtccctgcgggccttgtcctgattggctgggcacgcgtttaatataagtggaggcgtcgcgctggcgggcattcctgaagctgacagcattcgggccgagatgtctcgctccgtggccttagctgtgctcgcgctactctctctttctggcctggaggctatccagcgtgagtctctcctaccctcccgctctggtccttcctctcccgctctgcaccctctgtggccctcgctgtgctctctcgctccgtgacttcccttctccaagttctccttggtggcccgccgtggggctagtccagggctggatctcggggaagcggcggggtggcctgggagtggggaagggggtgcgcacccgggacgcgcgctacttgcccctttcggcggggagcaggggagacctttggcctacggcgacgggagggtcgggacaaagtttagggcgtcgataagcgtcagagcgccgaggttgggggagggtttctcttccgctctttcgcggggcctctggctcccccagcgcagctggagtgggggacgggtaggctcgtcccaaaggcgcggcgctgaggtttgtgaacgcgtggaggggcgcttggggtctgggggaggcgtcgcccgggtaagcctgtctgctgcggctctgcttcccttagactggagagctgtggacttcgtctaggcgcccgctaagttcgcatgtcctagcacctctgggtctatgtggggccacaccgtggggaggaaacagcacgcgacgtttgtagaatgcttggctgtgatacaaagcggtttcgaataattaacttatttgttcccatcacatgtcacttttaaaaaattataagaactacccgttattgacatctttctgtgtgccaaggactttatgtgctttgcgtcatttaattttgaaaacagttatcttccgccatagataactactatggttatcttctgcctctcacagatgaagaaactaaggcaccgagattttaagaaacttaattacacaggggataaatggcagcaatcgagattgaagtcaagcctaaccagggcttttgc

SEQ ID NO: 1285 - DNA, 1000 bp, Homo sapiens
  source 1..1000: mol_type = genomic DNA
ttgcctaggttggagggcagtggcatgatcacagctcactgaagccttgaaatcccgggctcaagtgaccctcctgcctcagcctctcaaatagctgggactacagttgtgcaccaccatgcctggctaattcttttgttttttgtaaagatagagtctcatcatgttgctcagactggtctcaaactcctggcctcaaaggatcctcccacttcggcctcccaaagctctgggattactggtgtgagccaccgtgcctggcaagaaacactttcaagtgggcctcactcccatcagtaatgtccctctcaggtcccttcccccacccacctggagtagccttaccttgcgagagaagggtagccagtaccaggccagagagaaacgtgctatgttccatctcccagcggaactcatccagtagataaagccaggtcaccgaactatcagcctgggtgagagctgccctcccctagctgactcacaggtaccggaaagaggagagtgggggaggaactagaagatgtctgcttctctgctttctgccgttgatggtgggaaattttcagagtgggggtgggctaggggtagggtaggaaggaagcggtgtaaattgctctatctctgagcagggagctggcagagaatatggaaaaggtggcctgaactttagcgtccctattgacaatgcaaccacatttacacacaacctaaacactgccacatctcgaagccccttgagagaagccgtcggccccatagcgcaagccgtagcagctagatttctcatggaggctgatctttctcaggacccttcactaggcagccagggacaccagatctagcagcttcttgtcagtgggaggttgggctttagagaccccagccagagatttgaatcctgggtccaatactgcctacctgtggggcctgggccagccataaaatttttcagagtcttattccattagtaccattattaggattcaaacaagatatt

SEQ ID NO: 1286 - DNA, 1000 bp, Homo sapiens
  source 1..1000: mol_type = genomic DNA
agcgccactgcactccagcctgggcaacaaagtgagactctgtctcaaaaaagaaaaagaaaaaaaaagtgaaaaaaattcctgaatgaaggcctggactgaggtggctttccatttggaggtccagccccaagcatctgagagtccctcctaaattcattacctacagcaacaacaactagcaacaagtaacaactggctacgatcctaacaactaatgacagggacatttatctccctcatgaagaaacggtcccaggaccatctcccacccagcatccattgcggttccctgtgcaagatgagtctctgagtgggaatccagcactctctccctcttcttccccaccaccttcaccctccttaacggaaaaacaaaaggcatctgcacctgcagccctgctgaggcccctgctgctcacacttgcagcagagggtggaggctctgggttcttgccttctctcaaaggccccagccccaacagtgatgggtggagccagtctagctgctgcacaggctggctggctggctggctgctaagggctgctccacgcttttgccggaggacagagactgacatggaacaggggaagggcctggctgtcctcatcctggctatcattcttcttcaaggtaagggcctactaggggtctggaagcctggggaagggctcaagggaagagcccatcactagtgagacaggaatattggtatccctaaccttcagcctacctctgctgtcaccttagagttcaaagaagggcaaaatggaggctcttaactgttctctgctagagagaaacagtgtcccatggaggagaaggaatccttgtctctgaaaaatgcaaacagagtacttaaatggctgaagagaggaccctgttaccgccatcttagatttgaatgcagcccaaaagggcataggccaagaaactaaaaggaaaaagtatatgttccctacttcagagctgggggctagcagtcgacctaggaaatgt

SEQ ID NO: 1287 - DNA, 521 bp, Homo sapiens
  source 1..521: mol_type = genomic DNA
tgagcctcccggtgagacaaatggacctttttcccctgtggcctacgaggatctgaaactcttcacgctgctgcagttagactgtcacttacctggggacagagtcatgcctgtcttgctcactgctgtatcttgtgcctggcacataacgggagctctgcacatttttgttggctcactgactgactggctgagggagataggggcctgagatcctggacattcagtccgggctctggcccctgaaaatgtgctggcctgtcctcggaattgttccacctattgccttccaggcgcctctttcatgatctcaaaagaatagtgaaaccaggtgccgtgtctcacgcctgtaatcccaacactttgggaggctgaggcaggtggatcacaaggtcaggagttcgagaccagcctgaccaacaaggtgaaaccccgtctctactaaaaatacaaaaattagccgggcttgctggcacgcacctgtaatctcagctactcaggaggctgaggcaggagaatcg

SEQ ID NO: 1288 - DNA, 1001 bp, Homo sapiens
  source 1..1001: mol_type = genomic DNA
tactcctcaccattgcatatgcctgggaggtcagaaaggatacgaacatattctgcccttctaggcttggaaaaaaaactgggcccaagttctcattacttaatctcgccacgacttcccccgctgctccccctccccacgtcgccggcccctacgtcatctcccacaacagcccatcctgaggcgcgcccccacctccttcccttccccctccattcaatccccggtttctgcaaagtggagcgggggtggggcggggtagcggaactcatgcgctgggcgtcagaaacccggcaggggaatggggtcccagattccgggcacgtgcacatgggtgaagaagctgttgaaaatacagctacaatctttttctgctctcctcccaactcatcttgcccctccctacctctgaacagtcgccttccaacacaagcaacaataaaggtaagggagaaagagaaactacctcgtagccaccttcactccagcccagccccaaggtcctggcccagccggctcgtgcgttgctttattttcctttttctgaatggttgtaacagccgcgatctgcctagatacacgggcggcctgctctgtcattggtcactgctgccacccggagacagaaggcgccgggctcgtaccggcggccgctgaagtctgcctggtaacagaatctgattggtcaataggggagggaaaatccaaagttggtcttatttgagtcaagagggggaagtccgggttgggtttcggttaaaactggggtcggttgggactgcaggtcccaagaggttcttctcttaaagggaccgcaggatgaaagaacgggcgctcggctccctttggaactgtcttttcttttgccctccccttttgtgtttcagtttagtctacggtcctcagagctgccggaagagaagaatcaatggatgataaaataactagacaatgatgggtaggagtgatggaagttcactgtaagctcctataacccccca

SEQ ID NO: 1289 - DNA, 20 bp, synthetic construct
  source 1..20: mol_type = other DNA
agagcaacagtgctgtggcc

SEQ ID NO: 1290 - DNA, 20 bp, synthetic construct
  source 1..20: mol_type = other DNA
aaagtcagatttgttgctcc

SEQ ID NO: 1291 - DNA, 20 bp, synthetic construct
  source 1..20: mol_type = other DNA
tggaataatgctgttgttga

SEQ ID NO: 1292 - DNA, 20 bp, synthetic construct
  source 1..20: mol_type = other DNA
ctggggaagaaggtgtcttc

SEQ ID NO: 1293 - DNA, 20 bp, synthetic construct
  source 1..20: mol_type = other DNA
cttacctgggctggggaaga

SEQ ID NO: 1294 - DNA, 20 bp, synthetic construct
  source 1..20: mol_type = other DNA
cttcttccccagcccaggta

SEQ ID NO: 1295 - DNA, 20 bp, synthetic construct
  source 1..20: mol_type = other DNA
ttcttccccagcccaggtaa

SEQ ID NO: 1296 - DNA, 20 bp, synthetic construct
  source 1..20: mol_type = other DNA
agctgcccttacctgggctg

SEQ ID NO: 1297 - DNA, 20 bp, synthetic construct
  source 1..20: mol_type = other DNA
aagctgcccttacctgggct

SEQ ID NO: 1298 - DNA, 20 bp, synthetic construct
  source 1..20: mol_type = other DNA
aaagctgcccttacctgggc

SEQ ID NO: 1299 - DNA, 20 bp, synthetic construct
  source 1..20: mol_type = other DNA
agcccaggtaagggcagctt

SEQ ID NO: 1300 - DNA, 20 bp, synthetic construct
  source 1..20: mol_type = other DNA
caccaaagctgcccttacct

SEQ ID NO: 1301 - DNA, 20 bp, synthetic construct
  source 1..20: mol_type = other DNA
gcaccaaagctgcccttacc

SEQ ID NO: 1302 - DNA, 20 bp, synthetic construct
  source 1..20: mol_type = other DNA
ggcagctttggtgccttcgc

SEQ ID NO: 1303 - DNA, 20 bp, synthetic construct
  source 1..20: mol_type = other DNA
agcaaggaaacagcctgcga

SEQ ID NO: 1304 - DNA, 20 bp, synthetic construct
  source 1..20: mol_type = other DNA
gcaggctgtttccttgcttc

SEQ ID NO: 1305 - DNA, 20 bp, synthetic construct
  source 1..20: mol_type = other DNA
ctgtttccttgcttcaggaa

SEQ ID NO: 1306 - DNA, 20 bp, synthetic construct
  source 1..20: mol_type = other DNA
tccttgcttcaggaatggcc

SEQ ID NO: 1307 - DNA, 20 bp, synthetic construct
  source 1..20: mol_type = other DNA
acctggccattcctgaagca

SEQ ID NO: 1308 - DNA, 20 bp, synthetic construct
  source 1..20: mol_type = other DNA
ccagagctctgggcagaacc

SEQ ID NO: 1309 - DNA, 20 bp, synthetic construct
  source 1..20: mol_type = other DNA
ccaggttctgcccagagctc

SEQ ID NO: 1310 - DNA, 20 bp, synthetic construct
  source 1..20: mol_type = other DNA
acatcattgaccagagctct

SEQ ID NO: 1311 - DNA, 20 bp, synthetic construct
  source 1..20: mol_type = other DNA
gacatcattgaccagagctc

SEQ ID NO: 1312 - DNA, 20 bp, synthetic construct
  source 1..20: mol_type = other DNA
actcctctgattggtggtct

SEQ ID NO: 1313 - DNA, 1001 bp, Homo sapiens
  source 1..1001: mol_type = genomic DNA
tccaatgtcttgggatgaaaatgacaggtgggccacttatgatctccagagaaattcagggcaatttggtgtgggagtaggcatggtagaggagagcagcatctaagaagtccccagcagaggctctcagcttgtcttgaggcatctgggcggagggctatgatactggccccatcctgcagaaggtggcagatattggcagctggcaccagtgcggttccattgtgatcatcatttctgaacgtcagactgttgaaggttcccccaacagactttctgtgcaactttctgtcttcaccaaattcagtccacagtaaggaagtgaaattaatttcagaggtgtggggagggcttaagggagtgtggtaaaattagagggtgttcagaaacagaaatctgaccgcttggggccaccttgcagggagagtttttttgatgatccctcacttgtttctttgcatgttggcttagcttggcgggctcccaactggtgactggttagtgatgaggctagtgatgaggctgtgtgcttctgagctgggcatccgaaggcatccttggggaagctgagggcacgaggaggggctgccagactccgggagctgctgcctggctgggattcctacacaatgcgttgcctggctccacgccctgctgggtcctacctgtcagagccccaaggtaaaaaggccgggaaagcatcttaatttagcgtgcagtctcagctggtcctgccattccagataaacagagaaaccattctgaattggggatgggggtgaggatgggaacaggagtctgtgtcctgctggggcaggccattggaagatgtgaaagagttgtctatttccttccaccggagggagacttcaggtcagccaggtgtctggagtatgaaccatgtatcagcaccgaaaggttctagaagtcagactttcgggcagtgtgtcactaactctcagcatgctggcctggctcggcccacagcaaggtcttctcgc

SEQ ID NO: 1314 - DNA, 2001 bp, Homo sapiens
  source 1..2001: mol_type = genomic DNA
atagggtgtcactatgttgcccaggctagcctccaactcccggcttcaagcaatcctcctgcttcggcctcccaaaatgttggaattacaggcacaagccacctggcccagccatctactttatattcaaataaaactttacgtcccattataaagggaaaaaatggcaaaaacaggaggtaaccatttaacaagaaagcagagtgatgttagattatagcaagatactgttgactgtagaaggctctgaggctagagagctgctttctataaaacagagtgatcatatattagaagaggtgttaaagacatgttcacaccaagctgagacttcctccttgataccaccaggaggatgggcagagactggaaaagacactaactttctccctatgggagtcagtattatttagcatcactttggcgggtcaccccaaaccatctgactacaagggtaccatatttgggttaacactcttttggtataatttatgttttagtccaatgtcttgggatgaaaatgacaggtgggccacttatgatctccagagaaattcagggcaatttggtgtgggagtaggcatggtagaggagagcagcatctaagaagtccccagcagaggctctcagcttgtcttgaggcatctgggcggagggctatgatactggccccatcctgcagaaggtggcagatattggcagctggcaccagtgcggttccattgtgatcatcatttctgaacgtcagactgttgaaggttcccccaacagactttctgtgcaactttctgtcttcaccaaattcagtccacagtaaggaagtgaaattaatttcagaggtgtggggagggcttaagggagtgtggtaaaattagagggtgttcagaaacagaaatctgaccgcttggggccaccttgcagggagagtttttttgatgatccctcacttgtttctttgcatgttggcttagcttggcgggctcccaactggtgactggttagtgatgaggctagtgatgaggctgtgtgcttctgagctgggcatccgaaggcatccttggggaagctgagggcacgaggaggggctgccagactccgggagctgctgcctggctgggattcctacacaatgcgttgcctggctccacgccctgctgggtcctacctgtcagagccccaaggtaaaaaggccgggaaagcatcttaatttagcgtgcagtctcagctggtcctgccattccagataaacagagaaaccattctgaattggggatgggggtgaggatgggaacaggagtctgtgtcctgctggggcaggccattggaagatgtgaaagagttgtctatttccttccaccggagggagacttcaggtcagccaggtgtctggagtatgaaccatgtatcagcaccgaaaggttctagaagtcagactttcgggcagtgtgtcactaactctcagcatgctggcctggctcggcccacagcaaggtcttctcgcctccctttgggtaaatactgaggggtgcctctgcaggacgggacctctgccagactccactccatacccagagaagcagggaaaccaaaattggagtcagccttgaggtgtagctgttgagccctcagcagctggggagagctggcggatgctgccctccccccagtttcctaatggtgttgtttaaaaagggtcaggggacgggggaacagatggtgggaagagcacagtgcagacacctggcaccggctctgaaggcagcatggcagctacaccgttggctgggaagggtgtgcccctgaagaagtcgtttacattctcgagtcaattttcctggagtgtacaatggacctgtgggaaagcctgtatgaaagggtaatgatgagggacctagcacagtgtccaatattttataggaactggaattgagctcataggagctcaattttattggcattgctgttgttggatggttaaaggggtggtatcccttttctcag

SEQ ID NO: 1315 - DNA, 20 bp, synthetic construct
  source 1..20: mol_type = other DNA
aggccgagaccaccaatcag

SEQ ID NO: 1316 - DNA, 20 bp, synthetic construct
  source 1..20: mol_type = other DNA
ggttttggtggcaatggata

SEQ ID NO: 1317 - DNA, 20 bp, synthetic construct
  source 1..20: mol_type = other DNA
aaagagggttttggtggcaa

SEQ ID NO: 1318 - DNA, 20 bp, synthetic construct
  source 1..20: mol_type = other DNA
agaaacagtgagccttgttc

SEQ ID NO: 1319 - DNA, 20 bp, synthetic construct
  source 1..20: mol_type = other DNA
ttctctggactgccagaaca

SEQ ID NO: 1320 - DNA, 20 bp, synthetic construct
  source 1..20: mol_type = other DNA
tggcagtccagagaatgaca

SEQ ID NO: 1321 - DNA, 20 bp, synthetic construct
  source 1..20: mol_type = other DNA
ggcagtccagagaatgacac

SEQ ID NO: 1322 - DNA, 20 bp, synthetic construct
  source 1..20: mol_type = other DNA
ttttttcccgtgtcattctc

SEQ ID NO: 1323 - DNA, 20 bp, synthetic construct
  source 1..20: mol_type = other DNA
gcagatgaagagaaggtggc

SEQ ID NO: 1324 - DNA, 20 bp, synthetic construct
  source 1..20: mol_type = other DNA
tgaagagaaggtggcaggag

SEQ ID NO: 1325 - DNA, 20 bp, synthetic construct
  source 1..20: mol_type = other DNA
gaagagaaggtggcaggaga

SEQ ID NO: 1326 - DNA, 20 bp, synthetic construct
  source 1..20: mol_type = other DNA
aggtggcaggagagggcacg

SEQ ID NO: 1327 - DNA, 20 bp, synthetic construct
  source 1..20: mol_type = other DNA
cagttggagagactgaggct

SEQ ID NO: 1328 - DNA, 20 bp, synthetic construct
  source 1..20: mol_type = other DNA
tcagttggagagactgaggc

SEQ ID NO: 1329 - DNA, 20 bp, synthetic construct
  source 1..20: mol_type = other DNA
gaactcagttggagagactg

SEQ ID NO: 1330 - DNA, 20 bp, synthetic construct
  source 1..20: mol_type = other DNA
caggcaggcaggaactcagt

SEQ ID NO: 1331 - DNA, 20 bp, synthetic construct
  source 1..20: mol_type = other DNA
ctgagcaaaggcaggcaggc

SEQ ID NO: 1332 - DNA, 20 bp, synthetic construct
  source 1..20: mol_type = other DNA
cagtctgagcaaaggcaggc

SEQ ID NO: 1333 - DNA, 20 bp, synthetic construct
  source 1..20: mol_type = other DNA
caaacagtctgagcaaaggc

SEQ ID NO: 1334 - DNA, 20 bp, synthetic construct
  source 1..20: mol_type = other DNA
ggggcaaacagtctgagcaa

SEQ ID NO: 1335 - DNA, 20 bp, synthetic construct
  source 1..20: mol_type = other DNA
ttgccccttactgctcttct

SEQ ID NO: 1336 - DNA, 20 bp, synthetic construct
  source 1..20: mol_type = other DNA
aggcctagaagagcagtaag

SEQ ID NO: 1337 - DNA, 20 bp, synthetic construct
  source 1..20: mol_type = other DNA
gaggcctagaagagcagtaa

SEQ ID NO: 1338 - DNA, 20 bp, synthetic construct
  source 1..20: mol_type = other DNA
tgaggcctagaagagcagta

SEQ ID NO: 1339 - DNA, 20 bp, synthetic construct
  source 1..20: mol_type = other DNA
tggagaaggggcttagaatg

SEQ ID NO: 1340 - DNA, 20 bp, synthetic construct
  source 1..20: mol_type = other DNA
ggagaggcaacttggagaag

SEQ ID NO: 1341 - DNA, 20 bp, synthetic construct
  source 1..20: mol_type = other DNA
aggagaggcaacttggagaa

SEQ ID NO: 1342 - DNA, 20 bp, synthetic construct
  source 1..20: mol_type = other DNA
aaggagaggcaacttggaga

SEQ ID NO: 1343 - DNA, 20 bp, synthetic construct
  source 1..20: mol_type = other DNA
agaaataaggagaggcaact

SEQ ID NO: 1344 - DNA, 20 bp, synthetic construct
  source 1..20: mol_type = other DNA
agacagggagaaataaggag

SEQ ID NO: 1345 - DNA, 20 bp, synthetic construct
  source 1..20: mol_type = other DNA
ttggcagacagggagaaata

SEQ ID NO: 1346 - DNA, 20 bp, synthetic construct
  source 1..20: mol_type = other DNA
gaaagattttttggcagaca

SEQ ID NO: 1347 - DNA, 20 bp, synthetic construct
  source 1..20: mol_type = other DNA
ggaaagattttttggcagac

SEQ ID NO: 1348 - DNA, 20 bp, synthetic construct
  source 1..20: mol_type = other DNA
gtgagctgggaaagattttt

SEQ ID NO: 1349 - DNA, 20 bp, synthetic construct
  source 1..20: mol_type = other DNA
tgagactgacttagtgagct

SEQ ID NO: 1350 - DNA, 20 bp, synthetic construct
  source 1..20: mol_type = other DNA
gtgagactgacttagtgagc

SEQ ID NO: 1351 - DNA, 20 bp, synthetic construct
  source 1..20: mol_type = other DNA
cggcacaatcagtgattggt

SEQ ID NO: 1352 - DNA, 20 bp, synthetic construct
  source 1..20: mol_type = other DNA
ccggcacaatcagtgattgg

SEQ ID NO: 1353 - DNA, 20 bp, synthetic construct
  source 1..20: mol_type = other DNA
ccaccaatcactgattgtgc

SEQ ID NO: 1354 - DNA, 20 bp, synthetic construct
  source 1..20: mol_type = other DNA
gtgccggcacaatcagtgat

SEQ ID NO: 1355 - DNA, 20 bp, synthetic construct
  source 1..20: mol_type = other DNA
tgccggcacatgaatgcacc

SEQ ID NO: 1356 - DNA, 20 bp, synthetic construct
  source 1..20: mol_type = other DNA
cacctggtgcattcatgtgc

SEQ ID NO: 1357 - DNA, 20 bp, synthetic construct
  source 1..20: mol_type = other DNA
gaatgcaccaggtgttgaag

SEQ ID NO: 1358 - DNA, 20 bp, synthetic construct
  source 1..20: mol_type = other DNA
tgcaccaggtgttgaagtgg

SEQ ID NO: 1359 - DNA, 20 bp, synthetic construct
  source 1..20: mol_type = other DNA
aattcctccacttcaacacc

SEQ ID NO: 1360 - DNA, 20 bp, synthetic construct
  source 1..20: mol_type = other DNA
cagatgaggggtgtgcccag

SEQ ID NO: 1361 - DNA, 20 bp, synthetic construct
  source 1..20: mol_type = other DNA
actagaatggtgcttcctct

SEQ ID NO: 1362 - DNA, 20 bp, synthetic construct
  source 1..20: mol_type = other DNA
aactagaatggtgcttcctc

SEQ ID NO: 1363 - DNA, 20 bp, synthetic construct
  source 1..20: mol_type = other DNA
agaggaagcaccattctagt

SEQ ID NO: 1364 - DNA, 20 bp, synthetic construct
  source 1..20: mol_type = other DNA
gaggaagcaccattctagtt

SEQ ID NO: 1365 - DNA, 20 bp, synthetic construct
  source 1..20: mol_type = other DNA
aggaagcaccattctagttg

SEQ ID NO: 1366 - DNA, 20 bp, synthetic construct
  source 1..20: mol_type = other DNA
ggaagcaccattctagttgg

SEQ ID NO: 1367 - DNA, 20 bp, synthetic construct
  source 1..20: mol_type = other DNA
atgggctcccccaactagaa

SEQ ID NO: 1368 - DNA, 20 bp, synthetic construct
  source 1..20: mol_type = other DNA
gggggagcccatctgtcagc

SEQ ID NO: 1369 - DNA, 20 bp, synthetic construct
  source 1..20: mol_type = other DNA
ggggagcccatctgtcagct

SEQ ID NO: 1370 - DNA, 20 bp, synthetic construct
  source 1..20: mol_type = other DNA
acttttcccagctgacagat

SEQ ID NO: 1371 - DNA, 20 bp, synthetic construct
  source 1..20: mol_type = other DNA
gacttttcccagctgacaga

SEQ ID NO: 1372 - DNA, 20 bp, synthetic construct
  source 1..20: mol_type = other DNA
aagtccaaataacttcagat

SEQ ID NO: 1373 - DNA, 20 bp, synthetic construct
  source 1..20: mol_type = other DNA
cattccaatctgaagttatt

SEQ ID NO: 1374 - DNA, 20 bp, synthetic construct
  source 1..20: mol_type = other DNA
attggaatgtgttttaactc

SEQ ID NO: 1375 - DNA, 20 bp, synthetic construct
  source 1..20: mol_type = other DNA
ttggaatgtgttttaactca

SEQ ID NO: 1376 - DNA, 20 bp, synthetic construct
  source 1..20: mol_type = other DNA
ttccctgacttttgtcctga

SEQ ID NO: 1377 - DNA, 20 bp, synthetic construct
  source 1..20: mol_type = other DNA
tgaagataccagccctacca

SEQ ID NO: 1378 - DNA, 20 bp, synthetic construct
  source 1..20: mol_type = other DNA
gaagataccagccctaccaa

SEQ ID NO: 1379 - DNA, 20 bp, synthetic construct
  source 1..20: mol_type = other DNA
ataccagccctaccaagggc

SEQ ID NO: 1380 - DNA, 20 bp, synthetic construct
  source 1..20: mol_type = other DNA
taccagccctaccaagggca

SEQ ID NO: 1381 - DNA, 20 bp, synthetic construct
  source 1..20: mol_type = other DNA
ctccctgcccttggtagggc

SEQ ID NO: 1382 - DNA, 20 bp, synthetic construct
  source 1..20: mol_type = other DNA
gccctaccaagggcagggag

SEQ ID NO: 1383 - DNA, 20 bp, synthetic construct
  source 1..20: mol_type = other DNA
tcctctccctgcccttggta

SEQ ID NO: 1384 - DNA, 20 bp, synthetic construct
  source 1..20: mol_type = other DNA
gtcctctccctgcccttggt

SEQ ID NO: 1385 - DNA, 20 bp, synthetic construct
  source 1..20: mol_type = other DNA
tagggtcctctccctgccct

SEQ ID NO: 1386 - DNA, 20 bp, synthetic construct
  source 1..20: mol_type = other DNA
gcagggagaggaccctatag

SEQ ID NO: 1387 - DNA, 20 bp, synthetic construct
  source 1..20: mol_type = other DNA
gagaggaccctatagaggcc

SEQ ID NO: 1388 - DNA, 20 bp, synthetic construct
  source 1..20: mol_type = other DNA
agaggaccctatagaggcct

SEQ ID NO: 1389 - DNA, 20 bp, synthetic construct
  source 1..20: mol_type = other DNA
accctatagaggcctgggac

SEQ ID NO: 1390 - DNA, 20 bp, synthetic construct
  source 1..20: mol_type = other DNA
tcctgtcccaggcctctata

SEQ ID NO: 1391 - DNA, 20 bp, synthetic construct
  source 1..20: mol_type = other DNA
ctcctgtcccaggcctctat

SEQ ID NO: 1392 - DNA, 20 bp, synthetic construct
  source 1..20: mol_type = other DNA
tctcattgagctcctgtccc

SEQ ID NO: 1393 - DNA, 20 bp, synthetic construct
  source 1..20: mol_type = other DNA
ggacaggagctcaatgagaa

SEQ ID NO: 1394 - DNA, 20 bp, synthetic construct
  source 1..20: mol_type = other DNA
gctcagggggatcagcctcg

SEQ ID NO: 1395 - DNA, 20 bp, synthetic construct
  source 1..20: mol_type = other DNA
tggttttcttcctcattacc

SEQ ID NO: 1396 - DNA, 20 bp, synthetic construct
  source 1..20: mol_type = other DNA
taaaggcttgcagcaaagct

SEQ ID NO: 1397 - DNA, 20 bp, synthetic construct
  source 1..20: mol_type = other DNA
gagcaagcactcttgttggc

SEQ ID NO: 1398 - DNA, 20 bp, synthetic construct
  source 1..20: mol_type = other DNA
ccccgtgttctgtcaatgcc

SEQ ID NO: 1399 - DNA, 20 bp, synthetic construct
  source 1..20: mol_type = other DNA
ggccatctagcccagccaga

SEQ ID NO: 1400 - DNA, 20 bp, synthetic construct
  source 1..20: mol_type = other DNA
gccgcctaaggggcaggctg

SEQ ID NO: 1401 - DNA, 20 bp, synthetic construct
  source 1..20: mol_type = other DNA
gccgggtgacgcaccatccc

SEQ ID NO: 1402 - DNA, 20 bp, synthetic construct
  source 1..20: mol_type = other DNA
cagtcccaggcgtgggtgtg

SEQ ID NO: 1403 - DNA, 20 bp, synthetic construct
  source 1..20: mol_type = other DNA
gacacggacgcttggccatg

SEQ ID NO: 1404 - DNA, 20 bp, synthetic construct
  source 1..20: mol_type = other DNA
gggcacaggcaggaagcacc

SEQ ID NO: 1405 - DNA, 20 bp, synthetic construct
  source 1..20: mol_type = other DNA
gacaggacaaactgctcagg

SEQ ID NO: 1406 - DNA, 20 bp, synthetic construct
  source 1..20: mol_type = other DNA
ggttttcttcctcattacct

SEQ ID NO: 1407 - DNA, 20 bp, synthetic construct
  source 1..20: mol_type = other DNA
caaagctgggctcccacgat

SEQ ID NO: 1408 - DNA, 20 bp, synthetic construct
  source 1..20: mol_type = other DNA
agcaagcactcttgttggct

SEQ ID NO: 1409 - DNA, 20 bp, synthetic construct
  source 1..20: mol_type = other DNA
gcccggcattgacagaacac

SEQ ID NO: 1410 - DNA, 20 bp, synthetic construct
  source 1..20: mol_type = other DNA
cggccatctagcccagccag

SEQ ID NO: 1411 - DNA, 20 bp, synthetic construct
  source 1..20: mol_type = other DNA
accccagcctgccccttagg

SEQ ID NO: 1412 - DNA, 20 bp, synthetic construct
  source 1..20: mol_type = other DNA
gtgcgtcacccggcagtccc

SEQ ID NO: 1413 - DNA, 20 bp, synthetic construct
  source 1..20: mol_type = other DNA
ctgtccccacacccacgcct

SEQ ID NO: 1414 - DNA, 20 bp, synthetic construct
  source 1..20: mol_type = other DNA
acggacgcttggccatgagg

SEQ ID NO: 1415 - DNA, 20 bp, synthetic construct
  source 1..20: mol_type = other DNA
ggggcacaggcaggaagcac

SEQ ID NO: 1416 - DNA, 20 bp, synthetic construct
  source 1..20: mol_type = other DNA
ggacaggacaaactgctcag

SEQ ID NO: 1417 - DNA, 20 bp, synthetic construct
  source 1..20: mol_type = other DNA
gttttctagcccaggtaatg

SEQ ID NO: 1418 - DNA, 20 bp, synthetic construct
  source 1..20: mol_type = other DNA
aaagctgggctcccacgatc

SEQ ID NO: 1419 - DNA, 20 bp, synthetic construct
  source 1..20: mol_type = other DNA
tgttggctgggcgctgctcg

SEQ ID NO: 1420 - DNA, 20 bp, synthetic construct
  source 1..20: mol_type = other DNA
ggcccggcattgacagaaca

SEQ ID NO: 1421 - DNA, 20 bp, synthetic construct
  source 1..20: mol_type = other DNA
ctgggctagatggccgccta

SEQ ID NO: 1422 - DNA, 20 bp, synthetic construct
  source 1..20: mol_type = other DNA
ctcaccccagcctgcccctt

SEQ ID NO: 1423 - DNA, 20 bp, synthetic construct
  source 1..20: mol_type = other DNA
tcacccggcagtcccaggcg

SEQ ID NO: 1424 - DNA, 20 bp, synthetic construct
  source 1..20: mol_type = other DNA
gctgtccccacacccacgcc

SEQ ID NO: 1425 - DNA, 20 bp, synthetic construct
  source 1..20: mol_type = other DNA
gcttggccatgaggtggcga

SEQ ID NO: 1426 - DNA, 20 bp, synthetic construct
  source 1..20: mol_type = other DNA
aggaggagaggggcacaggc

SEQ ID NO: 1427 - DNA, 20 bp, synthetic construct
  source 1..20: mol_type = other DNA
aggacaggacaaactgctca

SEQ ID NO: 1428 - DNA, 20 bp, synthetic construct
  source 1..20: mol_type = other DNA
attacctgggctagaaaaca

SEQ ID NO: 1429 - DNA, 20 bp, synthetic construct
  source 1..20: mol_type = other DNA
ggctcccacgatcgggaatg

SEQ ID NO: 1430 - DNA, 20 bp, synthetic construct
  source 1..20: mol_type = other DNA
tggctgggcgctgctcgtgg

SEQ ID NO: 1431 - DNA, 20 bp, synthetic construct
  source 1..20: mol_type = other DNA
tctgtcaatgccgggccctc

SEQ ID NO: 1432 - DNA, 20 bp, synthetic construct
  source 1..20: mol_type = other DNA
tgggctagatggccgcctaa

SEQ ID NO: 1433 - DNA, 20 bp, synthetic construct
  source 1..20: mol_type = other DNA
gggcaggctggggtgagtca

SEQ ID NO: 1434 - DNA, 20 bp, synthetic construct
  source 1..20: mol_type = other DNA
cacccggcagtcccaggcgt

SEQ ID NO: 1435 - DNA, 20 bp, synthetic construct
  source 1..20: mol_type = other DNA
gtgtggggacagccatgaca

SEQ ID NO: 1436 - DNA, 20 bp, synthetic construct
  source 1..20: mol_type = other DNA
acagcgccttcgccacctca

SEQ ID NO: 1437 - DNA, 20 bp, synthetic construct
  source 1..20: mol_type = other DNA
gcctgtgcccctctcctcct

SEQ ID NO: 1438 - DNA, 20 bp, synthetic construct
  source 1..20: mol_type = other DNA
gaggacaggacaaactgctc

SEQ ID NO: 1439 - DNA, 20 bp, synthetic construct
  source 1..20: mol_type = other DNA
acctgggctagaaaacatgg

SEQ ID NO: 1440 - DNA, 20 bp, synthetic construct
  source 1..20: mol_type = other DNA
ctcacctcattcccgatcgt

SEQ ID NO: 1441 - DNA, 20 bp, synthetic construct
  source 1..20: mol_type = other DNA
ctcgtggtggtgacttaacc

SEQ ID NO: 1442 - DNA, 20 bp, synthetic construct
  source 1..20: mol_type = other DNA
tcaatgccgggccctctggc

SEQ ID NO: 1443 - DNA, 20 bp, synthetic construct
  source 1..20: mol_type = other DNA
gggctagatggccgcctaag

SEQ ID NO: 1444 - DNA, 20 bp, synthetic construct
  source 1..20: mol_type = other DNA
ctggggtgagtcacggagcc

SEQ ID NO: 1445 - DNA, 20 bp, synthetic construct
  source 1..20: mol_type = other DNA
cacccacgcctgggactgcc

SEQ ID NO: 1446 - DNA, 20 bp, synthetic construct
  source 1..20: mol_type = other DNA
gtctaggctcagccttgtca

SEQ ID NO: 1447 - DNA, 20 bp, synthetic construct
  source 1..20: mol_type = other DNA
atgaggtggcgaaggcgctg

SEQ ID NO: 1448 - DNA, 20 bp, synthetic construct
  source 1..20: mol_type = other DNA
ttgtcctgtcctcttttcac

SEQ ID NO: 1449 - DNA, 20 bp, synthetic construct
  source 1..20: mol_type = other DNA
tccaccatgttttctagccc

SEQ ID NO: 1450 - DNA, 20 bp, synthetic construct
  source 1..20: mol_type = other DNA
cctcacctcattcccgatcg

SEQ ID NO: 1451 - DNA, 20 bp, synthetic construct
  source 1..20: mol_type = other DNA
ggcagatgagacgatgtgcc

SEQ ID NO: 1452 - DNA, 20 bp, synthetic construct
  source 1..20: mol_type = other DNA
caatgccgggccctctggct

SEQ ID NO: 1453 - DNA, 20 bp, synthetic construct
  source 1..20: mol_type = other DNA
tagatggccgcctaaggggc

SEQ ID NO: 1454 - DNA, 20 bp, synthetic construct
  source 1..20: mol_type = other DNA
tggggtgagtcacggagcct

SEQ ID NO: 1455 - DNA, 20 bp, synthetic construct
  source 1..20: mol_type = other DNA
acacccacgcctgggactgc

SEQ ID NO: 1456 - DNA, 20 bp, synthetic construct
  source 1..20: mol_type = other DNA
gacaaggctgagcctagaca

SEQ ID NO: 1457 - DNA, 20 bp, synthetic construct
  source 1..20: mol_type = other DNA
aggtggcgaaggcgctgtgg

SEQ ID NO: 1458 - DNA, 20 bp, synthetic construct
  source 1..20: mol_type = other DNA
aaaaccagtgaaaagaggac

SEQ ID NO: 1459 - DNA, 20 bp, synthetic construct
  source 1..20: mol_type = other DNA
gaaaacatggtggaagctaa

SEQ ID NO: 1460 - DNA, 20 bp, synthetic construct
  source 1..20: mol_type = other DNA
ccacgatcgggaatgaggtg

SEQ ID NO: 1461 - DNA, 20 bp, synthetic construct
  source 1..20: mol_type = other DNA
gccccgtgttctgtcaatgc

SEQ ID NO: 1462 - DNA, 20 bp, synthetic construct
  source 1..20: mol_type = other DNA
tctagcccagccagagggcc

SEQ ID NO: 1463 - DNA, 20 bp, synthetic construct
  source 1..20: mol_type = other DNA
tggccgcctaaggggcaggc

SEQ ID NO: 1464 - DNA, 20 bp, synthetic construct
  source 1..20: mol_type = other DNA
gtgagtcacggagcctggga

SEQ ID NO: 1465 - DNA, 20 bp, synthetic construct
  source 1..20: mol_type = other DNA
ggcagtcccaggcgtgggtg

SEQ ID NO: 1466 - DNA, 20 bp, synthetic construct
  source 1..20: mol_type = other DNA
tgagcctagacacggacgct

SEQ ID NO: 1467 - DNA, 20 bp, synthetic construct
  source 1..20: mol_type = other DNA
gcgctgtggaggctgccacc

SEQ ID NO: 1468 - DNA, 20 bp, synthetic construct
  source 1..20: mol_type = other DNA
ggaagaaaaccagtgaaaag

SEQ ID NO: 1469 - DNA, 20 bp, synthetic construct
  source 1..20: mol_type = other DNA
ctaaaggcttgcagcaaagc

SEQ ID NO: 1470 - DNA, 20 bp, synthetic construct
  source 1..20: mol_type = other DNA
tgaggagcaagcactcttgt

SEQ ID NO: 1471 - DNA, 20 bp, synthetic construct
  source 1..20: mol_type = other DNA
cccggcattgacagaacacg

SEQ ID NO: 1472 - DNA, 20 bp, synthetic construct
  source 1..20: mol_type = other DNA
ggccctctggctgggctaga

SEQ ID NO: 1473 - DNA, 20 bp, synthetic construct
  source 1..20: mol_type = other DNA
ggccgcctaaggggcaggct

SEQ ID NO: 1474 - DNA, 20 bp, synthetic construct
  source 1..20: mol_type = other DNA
gcctgggatggtgcgtcacc

SEQ ID NO: 1475 - DNA, 20 bp, synthetic construct
  source 1..20: mol_type = other DNA
gcagtcccaggcgtgggtgt

SEQ ID NO: 1476 - DNA, 20 bp, synthetic construct
  source 1..20: mol_type = other DNA
atggccaagcgtccgtgtct

SEQ ID NO: 1477 - DNA, 20 bp, synthetic construct
  source 1..20: mol_type = other DNA
cacaggcaggaagcaccggg

SEQ ID NO: 1478 - DNA, 20 bp, synthetic construct
  source 1..20: mol_type = other DNA
agtaagtggggtaaccaagg

SEQ ID NO: 1479 - DNA, 20 bp, synthetic construct
  source 1..20: mol_type = other DNA
tgaaacactccaatgggccc

SEQ ID NO: 1480 - DNA, 20 bp, synthetic construct
  source 1..20: mol_type = other DNA
gccaacaaagaagattttgt

SEQ ID NO: 1481 - DNA, 20 bp, synthetic construct
  source 1..20: mol_type = other DNA
agcttctttcaccctctggc

SEQ ID NO: 1482 - DNA, 20 bp, synthetic construct
  source 1..20: mol_type = other DNA
gtgtttcacagaagctggac

SEQ ID NO: 1483 - DNA, 20 bp, synthetic construct
  source 1..20: mol_type = other DNA
gagcaaccgaggcaggccca

SEQ ID NO: 1484 - DNA, 20 bp, synthetic construct
  source 1..20: mol_type = other DNA
ctcgaaaaatctgtacctgg

SEQ ID NO: 1485 - DNA, 20 bp, synthetic construct
  source 1..20: mol_type = other DNA
acggagcagatgccagcacc

SEQ ID NO: 1486 - DNA, 20 bp, synthetic construct
  source 1..20: mol_type = other DNA
ctcacttgcccattgatttg

SEQ ID NO: 1487 - DNA, 20 bp, synthetic construct
  source 1..20: mol_type = other DNA
gtggagggtggtgaggggct

SEQ ID NO: 1488 - DNA, 20 bp, synthetic construct
  source 1..20: mol_type = other DNA
aggggagtgggtgtgggtag

SEQ ID NO: 1489 - DNA, 20 bp, synthetic construct
  source 1..20: mol_type = other DNA
gggagtaagtggggtaacca

SEQ ID NO: 1490 - DNA, 20 bp, synthetic construct
  source 1..20: mol_type = other DNA
ctgaaacactccaatgggcc

SEQ ID NO: 1491 - DNA, 20 bp, synthetic construct
  source 1..20: mol_type = other DNA
aaaatcttctttgttggcaa

SEQ ID NO: 1492 - DNA, 20 bp, synthetic construct
  source 1..20: mol_type = other DNA
cttcagcttctttcaccctc

SEQ ID NO: 1493 - DNA, 20 bp, synthetic construct
  source 1..20: mol_type = other DNA
agggagtgtttcacagaagc

SEQ ID NO: 1494 - DNA, 20 bp, synthetic construct
  source 1..20: mol_type = other DNA
agagcaaccgaggcaggccc

SEQ ID NO: 1495 - protein, 2086 aa, synthetic construct
MNHDQEFDPPKVYPPVPAEKRKPIRVLSLFDGIATGLLVLKDLGIQVDRYIASEVCEDSITVGMVRHQGKIMYVGDVRSVTQKHIQEWGPFDLVIGGSPCNDLSIVNPARKGLYEGTGRLFFEFYRLLHDARPKEGDDRPFFWLFENVVAMGVSDKRDISRFLESNPVMIDAKEVSAAHRARYFWGNLPGMNRPLASTVNDKLELQECLEHGRIAKFSKVRTITTRSNSIKQGKDQHFPVFMNEKEDILWCTEMERVFGFPVHYTDVSNMSRLARQRLLGRSWSVPVIRHLFAPLKEYFACVSSGNSNANSRGPSFSSGLVPLSLRGSHMNPLEMFETVPVWRRQPVRVLSLFEDIKKELTSLGFLESGSDPGQLKHVVDVTDTVRKDVEEWGPFDLVYGATPPLGHTCDRPPSWYLFQFHRLLQYARPKPGSPRPFFWMFVDNLVLNKEDLDVASRFLEMEPVTIPDVHGGSLQNAVRVWSNIPAIRSRHWALVSEEELSLLAQNKQSSKLAAKWPTKLVKNCFLPLREYFKYFSTELTSSLGGPSSGAPPPSGGSPAGSPTSTEEGTSESATPESGPGTSTEPSEGSAPGSPAGSPTSTEEGTSTEPSEGSAPGTSTEPSEPKKKRKVYMDKKYSIGLAIGTNSVGWAVITDEYKVPSKKFKVLGNTDRHSIKKNLIGALLFDSGETAEATRLKRTARRRYTRRKNRICYLQEIFSNEMAKVDDSFFHRLEESFLVEEDKKHERHPIFGNIVDEVAYHEKYPTIYHLRKKLVDSTDKADLRLIYLALAHMIKFRGHFLIEGDLNPDNSDVDKLFIQLVQTYNQLFEENPINASGVDAKAILSARLSKSRRLENLIAQLPGEKKNGLFGNLIALSLGLTPNFKSNFDLAEDAKLQLSKDTYDDDLDNLLAQIGDQYADLFLAAKNLSDAILLSDILRVNTEITKAPLSASMIKRYDEHHQDLTLLKALVRQQLPEKYKEIFFDQSKNGYAGYIDGGASQEEFYKFIKPILEKMDGTEELLVKLNREDLLRKQRTFDNGSIPHQIHLGELHAILRRQEDFYPFLKDNREKIEKILTFRIPYYVGPLARGNSRFAWMTRKSEETITPWNFEEVVDKGASAQSFIERMTNFDKNLPNEKVLPKHSLLYEYFTVYNELTKVKYVTEGMRKPAFLSGEQKKAIVDLLFKTNRKVTVKQLKEDYFKKIECFDSVEISGVEDRFNASLGTYHDLLKIIKDKDFLDNEENEDILEDIVLTLTLFEDREMIEERLKTYAHLFDDKVMKQLKRRRYTGWGRLSRKLINGIRDKQSGKTILDFLKSDGFANRNFMQLIHDDSLTFKEDIQKAQVSGQGDSLHEHIANLAGSPAIKKGILQTVKVVDELVKVMGRHKPENIVIEMARENQTTQKGQKNSRERMKRIEEGIKELGSQILKEHPVENTQLQNEKLYLYYLQNGRDMYVDQELDINRLSDYDVDAIVPQSFLKDDSIDNKVLTRSDKNRGKSDNVPSEEVVKKMKNYWRQLLNAKLITQRKFDNLTKAERGGLSELDKAGFIKRQLVETRQITKHVAQILDSRMNTKYDENDKLIREVKVITLKSKLVSDFRKDFQFYKVREINNYHHAHDAYLNAVVGTALIKKYPKLESEFVYGDYKVYDVRKMIAKSEQEIGKATAKYFFYSNIMNFFKTEITLANGEIRKRPLIETNGETGEIVWDKGRDFATVRKVLSMPQVNIVKKTEVQTGGFSKESILPKRNSDKLIARKKDWDPKKYGGFDSPTVAYSVLVVAKVEKGKSKKLKSVKELLGITIMERSSFEKNPIDFLEAKGYKEVKKDLIIKLPKYSLFELENGRKRMLASAGELQKGNELALPSKYVNFLYLASHYEKLKGSPEDNEQKQLFVEQHKHYLDEIIEQISEFSKRVILADANLDKVLSAYNKHRDKPIREQAENIIHLFTLTNLGAPAAFKYFDTTIDRKRYTSTKEVLDATLIHQSITGLYETRIDLSQLGGDPKKKRKVSGSETPGTSESATPESTGRTLVTFKDVFVDFTREEWKLLDTAQQIVYRNVMLENYKNLVSLGYQLTKPDVILRLEKGEEP

SEQ ID NO: 1496 - protein, 1384 aa, synthetic construct
  VARIANT 695..939: note = may be absent
  VARIANT 997..1241: note = may be absent
  VARIANT 658..659: note = may be TR, LR or LK
  VARIANT 686..687: note = may be TR, LR or LK
  VARIANT 960..961: note = may be TR, LR or LK
  VARIANT 988..989: note = may be TR, LR or LK
  VARIANT 1262..1263: note = may be TR, LR or LK
  VARIANT 1290..1291: note = may be TR, LR or LK
MNHDQEFDPPKVYPPVPAEKRKPIRVLSLFDGIATGLLVLKDLGIQVDRYIASEVCEDSITVGMVRHQGKIMYVGDVRSVTQKHIQEWGPFDLVIGGSPCNDLSIVNPARKGLYEGTGRLFFEFYRLLHDARPKEGDDRPFFWLFENVVAMGVSDKRDISRFLESNPVMIDAKEVSAAHRARYFWGNLPGMNRPLASTVNDKLELQECLEHGRIAKFSKVRTITTRSNSIKQGKDQHFPVFMNEKEDILWCTEMERVFGFPVHYTDVSNMSRLARQRLLGRSWSVPVIRHLFAPLKEYFACVSSGNSNANSRGPSFSSGLVPLSLRGSHMNPLEMFETVPVWRRQPVRVLSLFEDIKKELTSLGFLESGSDPGQLKHVVDVTDTVRKDVEEWGPFDLVYGATPPLGHTCDRPPSWYLFQFHRLLQYARPKPGSPRPFFWMFVDNLVLNKEDLDVASRFLEMEPVTIPDVHGGSLQNAVRVWSNIPAIRSRHWALVSEEELSLLAQNKQSSKLAAKWPTKLVKNCFLPLREYFKYFSTELTSSLGGPSSGAPPPSGGSPAGSPTSTEEGTSESATPESGPGTSTEPSEGSAPGSPAGSPTSTEEGTSTEPSEGSAPGTSTEPSEPKKKRKVYSRPGERPFQCRICMRNFSXXXXXXXHXXTHTGEKPFQCRICMRNFSXXXXXXXHXXTHXXXXXXXXXXXXXXXXXXXXXXXXXXXXXXXXXXXXXXXXXXXXXXXXXXXXXXXXXXXXXXXXXXXXXXXXXXXXXXXXXXXXXXXXXXXXXXXXXXXXXXXXXXXXXXXXXXXXXXXXXXXXXXXXXXXXXXXXXXXXXXXXXXXXXXXXXXXXXXXXXXXXXXXXXXXXXXXXXXXXXXXXXXXXXXXXXXXXXXXXXXXXXXXXXXXXXXXXXXXXXXXXXXXXXXXXXXXXXXXXXXXXXXXXXXPFQCRICMRNFSXXXXXXXHXXTHTGEKPFQCRICMRNFSXXXXXXXHXXTHXXXXXXXXXXXXXXXXXXXXXXXXXXXXXXXXXXXXXXXXXXXXXXXXXXXXXXXXXXXXXXXXXXXXXXXXXXXXXXXXXXXXXXXXXXXXXXXXXXXXXXXXXXXXXXXXXXXXXXXXXXXXXXXXXXXXXXXXXXXXXXXXXXXXXXXXXXXXXXXXXXXXXXXXXXXXXXXXXXXXXXXXXXXXXXXXXXXXXXXXXXXXXXXXXXXXXXXXXXXXXXXXXXXXXXXXXXXXXXXXXXXXXXXXXXPFQCRICMRNFSXXXXXXXHXXTHTGEKPFQCRICMRNFSXXXXXXXHXXTHLRGSPKKKRKVSGSETPGTSESATPESTGRTLVTFKDVFVDFTREEWKLLDTAQQIVYRNVMLENYKNLVSLGYQLTKPDVILRLEKGEEP

SEQ ID NO: 1497 - protein, 386 aa, synthetic construct
MAAIPALDPEAEPSMDVILVGSSELSSSVSPGTGRDLIAYEVKANQRNIEDICICCGSLQVHTQHPLFEGGICAPCKDKFLDALFLYDDDGYQSYCSICCSGETLLICGNPDCTRCYCFECVDSLVGPGTSGKVHAMSNWVCYLCLPSSRSGLLQRRRKWRSQLKAFYDRESENPLEMFETVPVWRRQPVRVLSLFEDIKKELTSLGFLESGSDPGQLKHVVDVTDTVRKDVEEWGPFDLVYGATPPLGHTCDRPPSWYLFQFHRLLQYARPKPGSPRPFFWMFVDNLVLNKEDLDVASRFLEMEPVTIPDVHGGSLQNAVRVWSNIPAIRSRHWALVSEEELSLLAQNKQSSKLAAKWPTKLVKNCFLPLREYFKYFSTELTSSL

SEQ ID NO: 1498 - DNA, 1001 bp, Homo sapiens
  source 1..1001: mol_type = genomic DNA
agttatccctcaatgcaaatacaactcggccaaaggtgtggcccatccctctccgctccactattttcaaataagccacctctgccttcatggactgcgagctagtgactctaggctgtgacaccactgcatcccagcttcaaatctccccttgcaggcagtttgtgggggaaataataaaattagcatcctaacactacaagtcgtgagaccgctcaggaacaatcctaatttgcatactggaactcctgtagaagatactttgaaccgctttagatacaataggatcaggtaaaacggcgctgccttgccagccactgcaggttttcacctgacacagcccccagaccctgtctacgaatcccccagctggccgaaggggccgcggccgcacatgcgcagtcagtcccgttggttgtgcgctcagccccgcccccagaggcgccgcgctccctgacagcccgcgggcgtacacacgctgacgcgcaggctgcggtcgcgcaggcgcagtcggggcgccttcccggtataggcgccttttaccccagcgtgtcctgagtctttggttcgcgaagtgccgttaggccaagcaggtgctaaaagcccggggtcgtggaccccggccaggtcttagcagcatggaggcgcagggtgtagcggagggcgcggggccgggcgccgccagcggcgtgccccaccccgcggccctagccccggctgcggctcccaccttggcgccagcctcggtggcggccgcggcctctcaattcaccctgctagtgatgcaaccctgtgctgggcaggacgaggctgcggcccccgggggcagcgttggggcgggcaagcccgttaggtacctgtgcgaaggggccggggatggcgaagaggaggctggggaggacgaggcggacctgttagacacttcggaccctccggggggaggcgagagcgcggctagtttggaggatctagaggacgaggagactcactcggggggcgag

SEQ ID NO: 1499 - DNA, 20 bp, synthetic construct
  source 1..20: mol_type = other DNA
ctagaatacacagctcctcc

SEQ ID NO: 1500 - DNA, 20 bp, synthetic construct
  source 1..20: mol_type = other DNA
agcagatgccagcaccgggc

SEQ ID NO: 1501 - DNA, 20 bp, synthetic construct
  source 1..20: mol_type = other DNA
acttgcccattgatttgagg

SEQ ID NO: 1502 - DNA, 20 bp, synthetic construct
  source 1..20: mol_type = other DNA
agtggagggtggtgaggggc

SEQ ID NO: 1503 - DNA, 20 bp, synthetic construct
  source 1..20: mol_type = other DNA
atgtgtaggggagtgggtgt

SEQ ID NO: 1504 - DNA, 20 bp, synthetic construct
  source 1..20: mol_type = other DNA
ttggttaccccacttactcc

SEQ ID NO: 1505 - DNA, 20 bp, synthetic construct
  source 1..20: mol_type = other DNA
cgggcccattggagtgtttc

SEQ ID NO: 1506 - DNA, 20 bp, synthetic construct
  source 1..20: mol_type = other DNA
gttggcaaaggaagaaagaa

SEQ ID NO: 1507 - DNA, 20 bp, synthetic construct
  source 1..20: mol_type = other DNA
cagagggtgaaagaagctga

SEQ ID NO: 1508 - DNA, 20 bp, synthetic construct
  source 1..20: mol_type = other DNA
ccagggtagagaaacggaga

SEQ ID NO: 1509 - DNA, 20 bp, synthetic construct
  source 1..20: mol_type = other DNA
agcaagagagcaaccgaggc

SEQ ID NO: 1510 - DNA, 20 bp, synthetic construct
  source 1..20: mol_type = other DNA
gagctgtgtattctagcagc

SEQ ID NO: 1511 - DNA, 20 bp, synthetic construct
  source 1..20: mol_type = other DNA
tgaggggtccggcccggtgc

SEQ ID NO: 1512 - DNA, 20 bp, synthetic construct
  source 1..20: mol_type = other DNA
cttgcccattgatttgagga

SEQ ID NO: 1513 - DNA, 20 bp, synthetic construct
  source 1..20: mol_type = other DNA
gggtagtggagggtggtgag

SEQ ID NO: 1514 - DNA, 20 bp, synthetic construct
  source 1..20: mol_type = other DNA
tatgtgtaggggagtgggtg

SEQ ID NO: 1515 - DNA, 20 bp, synthetic construct
  source 1..20: mol_type = other DNA
tggttaccccacttactccc

SEQ ID NO: 1516 - DNA, 20 bp, synthetic construct
  source 1..20: mol_type = other DNA
atggcctgaaacactccaat

SEQ ID NO: 1517 - DNA, 20 bp, synthetic construct
  source 1..20: mol_type = other DNA
ttggcaaaggaagaaagaaa

SEQ ID NO: 1518 - DNA, 20 bp, synthetic construct
  source 1..20: mol_type = other DNA
agagggtgaaagaagctgaa

SEQ ID NO: 1519 - DNA, 20 bp, synthetic construct
  source 1..20: mol_type = other DNA
ccctctccgtttctctaccc

SEQ ID NO: 1520 - DNA, 20 bp, synthetic construct
  source 1..20: mol_type = other DNA
aggaagcaagagagcaaccg

SEQ ID NO: 1521 - DNA, 20 bp, synthetic construct
  source 1..20: mol_type = other DNA
ctctgaactgatgcccaact

SEQ ID NO: 1522 - DNA, 20 bp, synthetic construct
  source 1..20: mol_type = other DNA
gagcagtgaggggtccggcc

SEQ ID NO: 1523 - DNA, 20 bp, synthetic construct
  source 1..20: mol_type = other DNA
cctgccctcctcaaatcaat

SEQ ID NO: 1524 - DNA, 20 bp, synthetic construct
  source 1..20: mol_type = other DNA
tgggtagtggagggtggtga

SEQ ID NO: 1525 - DNA, 20 bp, synthetic construct
  source 1..20: mol_type = other DNA
ttgtgtatgtgtaggggagt

SEQ ID NO: 1526 - DNA, 20 bp, synthetic construct
  source 1..20: mol_type = other DNA
aatgggcccgggagtaagtg

SEQ ID NO: 1527 - DNA, 20 bp, synthetic construct
  source 1..20: mol_type = other DNA
catggcctgaaacactccaa

SEQ ID NO: 1528 - DNA, 20 bp, synthetic construct
  source 1..20: mol_type = other DNA
tggcaaaggaagaaagaaag

SEQ ID NO: 1529 - DNA, 20 bp, synthetic construct
  source 1..20: mol_type = other DNA
gaacgtcgcagcacgaaaca

SEQ ID NO: 1530 - DNA, 20 bp, synthetic construct
  source 1..20: mol_type = other DNA
cccagggtagagaaacggag

SEQ ID NO: 1531 - DNA, 20 bp, synthetic construct
  source 1..20: mol_type = other DNA
tgataagagaggaaggaaga

SEQ ID NO: 1532 - DNA, 20 bp, synthetic construct
  source 1..20: mol_type = other DNA
gatgcccaactcggctgtga

SEQ ID NO: 1533 - DNA, 20 bp, synthetic construct
  source 1..20: mol_type = other DNA
caagtgagcagtgaggggtc

SEQ ID NO: 1534 - DNA, 20 bp, synthetic construct
  source 1..20: mol_type = other DNA
cccattgatttgaggagggc

SEQ ID NO: 1535 - DNA, 20 bp, synthetic construct
  source 1..20: mol_type = other DNA
gtgggtagtggagggtggtg

SEQ ID NO: 1536 - DNA, 20 bp, synthetic construct
  source 1..20: mol_type = other DNA
caatgggcccgggagtaagt

SEQ ID NO: 1537 - DNA, 20 bp, synthetic construct
  source 1..20: mol_type = other DNA
ttgttggtcagtcaaggtca

SEQ ID NO: 1538 - DNA, 20 bp, synthetic construct
  source 1..20: mol_type = other DNA
gaaagaaaggggctgagtga

SEQ ID NO: 1539 - DNA, 20 bp, synthetic construct
  source 1..20: mol_type = other DNA
tcgcagcacgaaacatggcc

SEQ ID NO: 1540 - DNA, 20 bp, synthetic construct
  source 1..20: mol_type = other DNA
cctctccgtttctctaccct

SEQ ID NO: 1541 - DNA, 20 bp, synthetic construct
  source 1..20: mol_type = other DNA
tttcgagtgataagagagga

SEQ ID NO: 1542 - DNA, 20 bp, synthetic construct
  source 1..20: mol_type = other DNA
tgctccgtcacagccgagtt

SEQ ID NO: 1543 - DNA, 20 bp, synthetic construct
  source 1..20: mol_type = other DNA
atgggcaagtgagcagtgag

SEQ ID NO: 1544 - DNA, 20 bp, synthetic construct
  source 1..20: mol_type = other DNA
tcctgccctcctcaaatcaa

SEQ ID NO: 1545 - DNA, 20 bp, synthetic construct
  source 1..20: mol_type = other DNA
tgggtgtgggtagtggaggg

SEQ ID NO: 1546 - DNA, 20 bp, synthetic construct
  source 1..20: mol_type = other DNA
ccaatgggcccgggagtaag

SEQ ID NO: 1547 - DNA, 20 bp, synthetic construct
  source 1..20: mol_type = other DNA
aagattttgttggtcagtca

SEQ ID NO: 1548 - DNA, 20 bp, synthetic construct
  source 1..20: mol_type = other DNA
tgagtgacggagccagccag

SEQ ID NO: 1549 - DNA, 20 bp, synthetic construct
  source 1..20: mol_type = other DNA
aggatcggaaaatgtcagcc

SEQ ID NO: 1550 - DNA, 20 bp, synthetic construct
  source 1..20: mol_type = other DNA
gcaggcccagggtagagaaa

SEQ ID NO: 1551 - DNA, 20 bp, synthetic construct
  source 1..20: mol_type = other DNA
gatttttcgagtgataagag

SEQ ID NO: 1552 - DNA, 20 bp, synthetic construct
  source 1..20: mol_type = other DNA
ctgctccgtcacagccgagt

SEQ ID NO: 1553 - DNA, 20 bp, synthetic construct
  source 1..20: mol_type = other DNA
aatgggcaagtgagcagtga

SEQ ID NO: 1554 - DNA, 20 bp, synthetic construct
  source 1..20: mol_type = other DNA
ttgaggagggcaggatttga

SEQ ID NO: 1555 - DNA, 20 bp, synthetic construct
  source 1..20: mol_type = other DNA
gagtgggtgtgggtagtgga

SEQ ID NO: 1556 - DNA, 20 bp, synthetic construct
  source 1..20: mol_type = other DNA
ccacttactcccgggcccat

SEQ ID NO: 1557 - DNA, 20 bp, synthetic construct
  source 1..20: mol_type = other DNA
accaacaaaatcttctttgt

SEQ ID NO: 1558 - DNA, 20 bp, synthetic construct
  source 1..20: mol_type = other DNA
gagtgacggagccagccaga

SEQ ID NO: 1559 - DNA, 20 bp, synthetic construct
  source 1..20: mol_type = other DNA
tcacagaagctggacaggat

SEQ ID NO: 1560 - DNA, 20 bp, synthetic construct
  source 1..20: mol_type = other DNA
tctctaccctgggcctgcct

SEQ ID NO: 1561 - DNA, 20 bp, synthetic construct
  source 1..20: mol_type = other DNA
tcactcgaaaaatctgtacc

SEQ ID NO: 1562 - DNA, 20 bp, synthetic construct
  source 1..20: mol_type = other DNA
gacggagcagatgccagcac

SEQ ID NO: 1563 - DNA, 20 bp, synthetic construct
  source 1..20: mol_type = other DNA
caatgggcaagtgagcagtg

SEQ ID NO: 1564 - DNA, 20 bp, synthetic construct
  source 1..20: mol_type = other DNA
tggagggtggtgaggggctg

SEQ ID NO: 1565 - DNA, 20 bp, synthetic construct
  source 1..20: mol_type = other DNA
ggagtgggtgtgggtagtgg

SEQ ID NO: 1566 - DNA, 20 bp, synthetic construct
  source 1..20: mol_type = other DNA
gttccctgccgtcgacacgt

SEQ ID NO: 1567 - DNA, 20 bp, synthetic construct
  source 1..20: mol_type = other DNA
taatcggcaactgtgcctgc

SEQ ID NO: 1568 - DNA, 20 bp, synthetic construct
  source 1..20: mol_type = other DNA
ccagcctctttctgagggaa

SEQ ID NO: 1569 - DNA, 20 bp, synthetic construct
  source 1..20: mol_type = other DNA
ggaggcagaggctgaggcag

SEQ ID NO: 1570 - DNA, 20 bp, synthetic construct
  source 1..20: mol_type = other DNA
aggagaaaaggagtctctgc

SEQ ID NO: 1571 - DNA, 20 bp, synthetic construct
  source 1..20: mol_type = other DNA
cccaggaagtggaggactgt

SEQ ID NO: 1572 - DNA, 20 bp, synthetic construct
  source 1..20: mol_type = other DNA
aagggggagtgcgaatttct

SEQ ID NO: 1573 - DNA, 20 bp, synthetic construct
  source 1..20: mol_type = other DNA
ggttcacaggcaggaagccc

SEQ ID NO: 1574 - DNA, 20 bp, synthetic construct
  source 1..20: mol_type = other DNA
cctggaggtttgagggtttg

SEQ ID NO: 1575 - DNA, 20 bp, synthetic construct
  source 1..20: mol_type = other DNA
cataaaatatttgacagtct

SEQ ID NO: 1576 - DNA, 20 bp, synthetic construct
  source 1..20: mol_type = other DNA
atctgtctctacatttgtcc

SEQ ID NO: 1577 - DNA, 20 bp, synthetic construct
  source 1..20: mol_type = other DNA
gggccgacgtgtcgacggca

SEQ ID NO: 1578 - DNA, 20 bp, synthetic construct
  source 1..20: mol_type = other DNA
cggcaactgtgcctgcagga

SEQ ID NO: 1579 - DNA, 20 bp, synthetic construct
  source 1..20: mol_type = other DNA
cctttccctcagaaagaggc

SEQ ID NO: 1580 - DNA, 20 bp, synthetic construct
  source 1..20: mol_type = other DNA
ggcagaggctgaggcagcgg

SEQ ID NO: 1581 - DNA, 20 bp, synthetic construct
  source 1..20: mol_type = other DNA
tattctgcagctacctcccc

SEQ ID NO: 1582 - DNA, 20 bp, synthetic construct
  source 1..20: mol_type = other DNA
ccccacagtcctccacttcc

SEQ ID NO: 1583 - DNA, 20 bp, synthetic construct
  source 1..20: mol_type = other DNA
gaaattcgcactcccccttt

SEQ ID NO: 1584 - DNA, 20 bp, synthetic construct
  source 1..20: mol_type = other DNA
tcacaggcaggaagccctgg

SEQ ID NO: 1585 - DNA, 20 bp, synthetic construct
  source 1..20: mol_type = other DNA
aaaaaggagcattaaaacaa

SEQ ID NO: 1586 - DNA, 20 bp, synthetic construct
  source 1..20: mol_type = other DNA
ctagactgtcaaatatttta

SEQ ID NO: 1587 - DNA, 20 bp, synthetic construct
  source 1..20: mol_type = other DNA
aaatgtagagacagattcct

SEQ ID NO: 1588 - DNA, 20 bp, synthetic construct
  source 1..20: mol_type = other DNA
agggccgacgtgtcgacggc

SEQ ID NO: 1589 - DNA, 20 bp, synthetic construct
  source 1..20: mol_type = other DNA
ctgtgcctgcaggatggccg

SEQ ID NO: 1590 - DNA, 20 bp, synthetic construct
  source 1..20: mol_type = other DNA
ctttccctcagaaagaggct

SEQ ID NO: 1591 - DNA, 20 bp, synthetic construct
  source 1..20: mol_type = other DNA
gaggctgaggcagcggtggc

SEQ ID NO: 1592 - DNA, 20 bp, synthetic construct
  source 1..20: mol_type = other DNA
gcagctacctccccaggaag

SEQ ID NO: 1593 - DNA, 20 bp, synthetic construct
  source 1..20: mol_type = other DNA
ccaggaagtggaggactgtg

SEQ ID NO: 1594 - DNA, 20 bp, synthetic construct
  source 1..20: mol_type = other DNA
cactccccctttcggttcac

SEQ ID NO: 1595 - DNA, 20 bp, synthetic construct
  source 1..20: mol_type = other DNA
caggaagccctggaggtttg

SEQ ID NO: 1596 - DNA, 20 bp, synthetic construct
  source 1..20: mol_type = other DNA
gaattattttttttaaaaaa

SEQ ID NO: 1597 - DNA, 20 bp, synthetic construct
  source 1..20: mol_type = other DNA
gactgtcaaatattttatgg

SEQ ID NO: 1598 - DNA, 20 bp, synthetic construct
  source 1..20: mol_type = other DNA
aggtagggccgacgtgtcga

SEQ ID NO: 1599 - DNA, 20 bp, synthetic construct
  source 1..20: mol_type = other DNA
tttcaccgcggccatcctgc

SEQ ID NO: 1600 - DNA, 20 bp, synthetic construct
  source 1..20: mol_type = other DNA
tccctcagaaagaggctggg

SEQ ID NO: 1601 - DNA, 20 bp, synthetic construct
  source 1..20: mol_type = other DNA
aggctgaggcagcggtggcc

SEQ ID NO: 1602 - DNA, 20 bp, synthetic construct
  source 1..20: mol_type = other DNA
gctacctccccaggaagtgg

SEQ ID NO: 1603 - DNA, 20 bp, synthetic construct
  source 1..20: mol_type = other DNA
gtcggcaggtgctttctcaa

SEQ ID NO: 1604 - DNA, 20 bp, synthetic construct
  source 1..20: mol_type = other DNA
cctgcctgtgaaccgaaagg

SEQ ID NO: 1605 - DNA, 20 bp, synthetic construct
  source 1..20: mol_type = other DNA
aggaagccctggaggtttga

SEQ ID NO: 1606 - DNA, 20 bp, synthetic construct
  source 1..20: mol_type = other DNA
tatctaattcctatcttgat

SEQ ID NO: 1607 - DNA, 20 bp, synthetic construct
  source 1..20: mol_type = other DNA
gtcaaatattttatggtggc

SEQ ID NO: 1608 - DNA, 20 bp, synthetic construct
  source 1..20: mol_type = other DNA
acgtcggccctacctgtaat

SEQ ID NO: 1609 - DNA, 20 bp, synthetic construct
  source 1..20: mol_type = other DNA
gtggaaggcgcttttcaccg

SEQ ID NO: 1610 - DNA, 20 bp, synthetic construct
  source 1..20: mol_type = other DNA
gcctcccagcctctttctga

SEQ ID NO: 1611 - DNA, 20 bp, synthetic construct
  source 1..20: mol_type = other DNA
tgaggcagcggtggccggga

SEQ ID NO: 1612 - DNA, 20 bp, synthetic construct
  source 1..20: mol_type = other DNA
cagtcctccacttcctgggg

SEQ ID NO: 1613 - DNA, 20 bp, synthetic construct
  source 1..20: mol_type = other DNA
ttgagaaagcacctgccgac

SEQ ID NO: 1614 - DNA, 20 bp, synthetic construct
  source 1..20: mol_type = other DNA
ccccctttcggttcacaggc

SEQ ID NO: 1615 - DNA, 20 bp, synthetic construct
  source 1..20: mol_type = other DNA
gccctggaggtttgagggtt

SEQ ID NO: 1616 - DNA, 20 bp, synthetic construct
  source 1..20: mol_type = other DNA
tggactttaccaatcaagat

SEQ ID NO: 1617 - DNA, 20 bp, synthetic construct
  source 1..20: mol_type = other DNA
ctggcaaaatgacagaaccc

SEQ ID NO: 1618 - DNA, 20 bp, synthetic construct
  source 1..20: mol_type = other DNA
acagttgccgattacaggta

SEQ ID NO: 1619 - DNA, 20 bp, synthetic construct
  source 1..20: mol_type = other DNA
aaaggacaagatgaagtgga

SEQ ID NO: 1620 - DNA, 20 bp, synthetic construct
  source 1..20: mol_type = other DNA
tgcctcccagcctctttctg

SEQ ID NO: 1621 - DNA, 20 bp, synthetic construct
  source 1..20: mol_type = other DNA
cagcggtggccgggacggtt

SEQ ID NO: 1622 - DNA, 20 bp, synthetic construct
  source 1..20: mol_type = other DNA
ccacagtcctccacttcctg

SEQ ID NO: 1623 - DNA, 20 bp, synthetic construct
  source 1..20: mol_type = other DNA
tgagaaagcacctgccgaca

SEQ ID NO: 1624 - DNA, 20 bp, synthetic construct
  source 1..20: mol_type = other DNA
tcctgcctgtgaaccgaaag

SEQ ID NO: 1625 - DNA, 20 bp, synthetic construct
  source 1..20: mol_type = other DNA
cccaaaccctcaaacctcca

SEQ ID NO: 1626 - DNA, 20 bp, synthetic construct
  source 1..20: mol_type = other DNA
gattggtaaagtccatctct

SEQ ID NO: 1627 - DNA, 20 bp, synthetic construct
  source 1..20: mol_type = other DNA
agaaccctggattagagtcc

SEQ ID NO: 1628 - DNA, 20 bp, synthetic construct
  source 1..20: mol_type = other DNA
cacagttgccgattacaggt

SEQ ID NO: 1629 - DNA, 20 bp, synthetic construct
  source 1..20: mol_type = other DNA
agggaaaggacaagatgaag

SEQ ID NO: 1630 - DNA, 20 bp, synthetic construct
  source 1..20: mol_type = other DNA
agaaagaggctgggaggcag

SEQ ID NO: 1631 - DNA, 20 bp, synthetic construct
  source 1..20: mol_type = other DNA
gccgggacggttaggagaaa

SEQ ID NO: 1632 - DNA, 20 bp, synthetic construct
  source 1..20: mol_type = other DNA
ccccaggaagtggaggactg

SEQ ID NO: 1633 - DNA, 20 bp, synthetic construct
  source 1..20: mol_type = other DNA
aatttcttggccctgtcggc

SEQ ID NO: 1634 - DNA, 20 bp, synthetic construct
  source 1..20: mol_type = other DNA
ttcctgcctgtgaaccgaaa

SEQ ID NO: 1635 - DNA, 20 bp, synthetic construct
  source 1..20: mol_type = other DNA
ccctggaggtttgagggttt

SEQ ID NO: 1636 - DNA, 20 bp, synthetic construct
  source 1..20: mol_type = other DNA
aacttgtatttgcctagaga

SEQ ID NO: 1637 - DNA, 20 bp, synthetic construct
  source 1..20: mol_type = other DNA
ttgtcctggactctaatcca

SEQ ID NO: 1638 - DNA, 20 bp, synthetic construct
  source 1..20: mol_type = other DNA
caggcacagttgccgattac

SEQ ID NO: 1639 - DNA, 20 bp, synthetic construct
  source 1..20: mol_type = other DNA
ttgtcctttccctcagaaag

SEQ ID NO: 1640 - DNA, 20 bp, synthetic construct
  source 1..20: mol_type = other DNA
aggctgggaggcagaggctg

SEQ ID NO: 1641 - DNA, 20 bp, synthetic construct
  source 1..20: mol_type = other DNA
tccttttctcctaaccgtcc

SEQ ID NO: 1642 - DNA, 20 bp, synthetic construct
  source 1..20: mol_type = other DNA
cccacagtcctccacttcct

SEQ ID NO: 1643 - DNA, 20 bp, synthetic construct
  source 1..20: mol_type = other DNA
tgcgaatttcttggccctgt

SEQ ID NO: 1644 - DNA, 20 bp, synthetic construct
  source 1..20: mol_type = other DNA
cttcctgcctgtgaaccgaa

SEQ ID NO: 1645 - DNA, 20 bp, synthetic construct
  source 1..20: mol_type = other DNA
ccccaaaccctcaaacctcc

SEQ ID NO: 1646 - DNA, 20 bp, synthetic construct
  source 1..20: mol_type = other DNA
aggcaaatacaagttctcga

SEQ ID NO: 1647 - DNA, 20 bp, synthetic construct
  source 1..20: mol_type = other DNA
tttgtcctggactctaatcc

SEQ ID NO: 1648 - DNA, 20 bp, synthetic construct
  source 1..20: mol_type = other DNA
tccaacacaagcaacaataa

SEQ ID NO: 1649 - DNA, 20 bp, synthetic construct
  source 1..20: mol_type = other DNA
ctggagtgaaggtggctacg

SEQ ID NO: 1650 - DNA, 20 bp, synthetic construct
  source 1..20: mol_type = other DNA
gccggctgggccaggacctt

SEQ ID NO: 1651 - DNA, 20 bp, synthetic construct
  source 1..20: mol_type = other DNA
tgcgctgggcgtcagaaacc

SEQ ID NO: 1652 - DNA, 20 bp, synthetic construct
  source 1..20: mol_type = other DNA
tgggccaggaccttggggct

SEQ ID NO: 1653 - DNA, 20 bp, synthetic construct
  source 1..20: mol_type = other DNA
ccggctgggccaggaccttg

SEQ ID NO: 1654 - DNA, 20 bp, synthetic construct
  source 1..20: mol_type = other DNA
gggctgggctggagtgaagg

SEQ ID NO: 1655 - DNA, 20 bp, synthetic construct
  source 1..20: mol_type = other DNA
tgctgccacccggagacaga

SEQ ID NO: 1656 - DNA, 20 bp, synthetic construct
  source 1..20: mol_type = other DNA
ctgggccaggaccttggggc

SEQ ID NO: 1657 - DNA, 20 bp, synthetic construct
  source 1..20: mol_type = other DNA
gttggaaggcgactgttcag

SEQ ID NO: 1658 - DNA, 20 bp, synthetic construct
  source 1..20: mol_type = other DNA
ggtagcggaactcatgcgct

SEQ ID NO: 1659 - DNA, 20 bp, synthetic construct
  source 1..20: mol_type = other DNA
gaaggcgactgttcagaggt

SEQ ID NO: 1660 - DNA, 20 bp, synthetic construct
  source 1..20: mol_type = other DNA
agaaggcgccgggctcgtac

SEQ ID NO: 1661 - DNA, 20 bp, synthetic construct
  source 1..20: mol_type = other DNA
tagggaggggcaagatgagt

SEQ ID NO: 1662 - DNA, 20 bp, synthetic construct
  source 1..20: mol_type = other DNA
tgagtcaagagggggaagtc

SEQ ID NO: 1663 - DNA, 20 bp, synthetic construct
  source 1..20: mol_type = other DNA
ggttaaaactggggtcggtt

SEQ ID NO: 1664 - DNA, 20 bp, synthetic construct
  source 1..20: mol_type = other DNA
aagcaacgcacgagccggct

SEQ ID NO: 1665 - DNA, 20 bp, synthetic construct
  source 1..20: mol_type = other DNA
ggggagggaaaatccaaagt

SEQ ID NO: 1666 - DNA, 20 bp, synthetic construct
  source 1..20: mol_type = other DNA
ccccaaggtcctggcccagc

SEQ ID NO: 1667 - DNA, 20 bp, synthetic construct
  source 1..20: mol_type = other DNA
ccagcccagccccaaggtcc

SEQ ID NO: 1668 - DNA, 20 bp, synthetic construct
  source 1..20: mol_type = other DNA
cacaagcaacaataaaggta

SEQ ID NO: 1669 - DNA, 20 bp, synthetic construct
  source 1..20: mol_type = other DNA
cgactgttcagaggtaggga

SEQ ID NO: 1670 - DNA, 20 bp, synthetic construct
  source 1..20: mol_type = other DNA
acaagcaacaataaaggtaa

SEQ ID NO: 1671 - DNA, 20 bp, synthetic construct
  source 1..20: mol_type = other DNA
agcccggcgccttctgtctc

SEQ ID NO: 1672 - DNA, 20 bp, synthetic construct
  source 1..20: mol_type = other DNA
tgggaccccattcccctgcc

SEQ ID NO: 1673 - DNA, 20 bp, synthetic construct
  source 1..20: mol_type = other DNA
agggaggggcaagatgagtt

SEQ ID NO: 1674 - DNA, 20 bp, synthetic construct
  source 1..20: mol_type = other DNA
gtcttatttgagtcaagagg

SEQ ID NO: 1675 - DNA, 20 bp, synthetic construct
  source 1..20: mol_type = other DNA
aaataaagcaacgcacgagc

SEQ ID NO: 1676 - DNA, 20 bp, synthetic construct
  source 1..20: mol_type = other DNA
ggaccgcaggatgaaagaac

SEQ ID NO: 1677 - DNA, 20 bp, synthetic construct
  source 1..20: mol_type = other DNA
gtgggggcgcgcctcaggat

SEQ ID NO: 1678 - DNA, 20 bp, synthetic construct
  source 1..20: mol_type = other DNA
ttattgttgcttgtgttgga

SEQ ID NO: 1679 - DNA, 20 bp, synthetic construct
  source 1..20: mol_type = other DNA
gttgggtttcggttaaaact

SEQ ID NO: 1680 - DNA, 20 bp, synthetic construct
  source 1..20: mol_type = other DNA
cacccggagacagaaggcgc

SEQ ID NO: 1681 - DNA, 20 bp, synthetic construct
  source 1..20: mol_type = other DNA
cggcgccttctgtctccggg

SEQ ID NO: 1682 - DNA, 20 bp, synthetic construct
  source 1..20: mol_type = other DNA
cgcgatctgcctagatacac

SEQ ID NO: 1683 - DNA, 20 bp, synthetic construct
  source 1..20: mol_type = other DNA
ttccccctccattcaatccc

SEQ ID NO: 1684 - DNA, 20 bp, synthetic construct
  source 1..20: mol_type = other DNA
agcaggccgcccgtgtatct

SEQ ID NO: 1685 - DNA, 20 bp, synthetic construct
  source 1..20: mol_type = other DNA
gactgttcagaggtagggag

SEQ ID NO: 1686 - DNA, 20 bp, synthetic construct
  source 1..20: mol_type = other DNA
gggagcagcgggggaagtcg

SEQ ID NO: 1687 - DNA, 20 bp, synthetic construct
  source 1..20: mol_type = other DNA
ccaggaccttggggctgggc

SEQ ID NO: 1688 - DNA, 20 bp, synthetic construct
  source 1..20: mol_type = other DNA
gagtcaagagggggaagtcc

SEQ ID NO: 1689 - DNA, 20 bp, synthetic construct
  source 1..20: mol_type = other DNA
gcagtgaccaatgacagagc

SEQ ID NO: 1690 - DNA, 20 bp, synthetic construct
  source 1..20: mol_type = other DNA
aacgggcgctcggctccctt

SEQ ID NO: 1691 - DNA, 20 bp, synthetic construct
  source 1..20: mol_type = other DNA
acccggagacagaaggcgcc

SEQ ID NO: 1692 - DNA, 20 bp, synthetic construct
  source 1..20: mol_type = other DNA
aaggcgactgttcagaggta

SEQ ID NO: 1693 - DNA, 20 bp, synthetic construct
  source 1..20: mol_type = other DNA
gattccgggcacgtgcacat

SEQ ID NO: 1694 - DNA, 20 bp, synthetic construct
  source 1..20: mol_type = other DNA
tgggcgtcagaaacccggca

SEQ ID NO: 1695 - DNA, 20 bp, synthetic construct
  source 1..20: mol_type = other DNA
gggaagtccgggttgggttt

SEQ ID NO: 1696 - DNA, 20 bp, synthetic construct
  source 1..20: mol_type = other DNA
gcgactgttcagaggtaggg

SEQ ID NO: 1697 - DNA, 20 bp, synthetic construct
  source 1..20: mol_type = other DNA
gaggggcaagatgagttggg

SEQ ID NO: 1698 - DNA, 20 bp, synthetic construct
  source 1..20: mol_type = other DNA
tgtgcacgtgcccggaatct

SEQ ID NO: 1699 - DNA, 20 bp, synthetic construct
  source 1..20: mol_type = other DNA
ttcactccagcccagcccca

SEQ ID NO: 1700 - DNA, 20 bp, synthetic construct
  source 1..20: mol_type = other DNA
gggcgtcagaaacccggcag

SEQ ID NO: 1701 - DNA, 20 bp, synthetic construct
  source 1..20: mol_type = other DNA
gtttctgcaaagtggagcgg

SEQ ID NO: 1702 - DNA, 20 bp, synthetic construct
  source 1..20: mol_type = other DNA
gatctgcctagatacacggg

SEQ ID NO: 1703 - DNA, 20 bp, synthetic construct
  source 1..20: mol_type = other DNA
tgttgtgggagatgacgtag

SEQ ID NO: 1704 - DNA, 20 bp, synthetic construct
  source 1..20: mol_type = other DNA
cagaaacccggcaggggaat

SEQ ID NO: 1705 - DNA, 20 bp, synthetic construct
  source 1..20: mol_type = other DNA
agattaagtaatgagaactt

SEQ ID NO: 1706 - DNA, 20 bp, synthetic construct
  source 1..20: mol_type = other DNA
gcccggcgccttctgtctcc

SEQ ID NO: 1707 - DNA, 20 bp, synthetic construct
  source 1..20: mol_type = other DNA
gttttaaccgaaacccaacc

SEQ ID NO: 1708 - DNA, 20 bp, synthetic construct
  source 1..20: mol_type = other DNA
agaaaccggggattgaatgg

SEQ ID NO: 1709 - DNA, 20 bp, synthetic construct
  source 1..20: mol_type = other DNA
cgggcggcctgctctgtcat

SEQ ID NO: 1710 - DNA, 20 bp, synthetic construct
  source 1..20: mol_type = other DNA
gggaccgcaggatgaaagaa

SEQ ID NO: 1711 - DNA, 20 bp, synthetic construct
  source 1..20: mol_type = other DNA
ccgtgtatctaggcagatcg

SEQ ID NO: 1712 - DNA, 20 bp, synthetic construct
  source 1..20: mol_type = other DNA
tcttctcttaaagggaccgc

SEQ ID NO: 1713 - DNA, 20 bp, synthetic construct
  source 1..20: mol_type = other DNA
ggtcttatttgagtcaagag

SEQ ID NO: 1714 - DNA, 20 bp, synthetic construct
  source 1..20: mol_type = other DNA
tcccacaacagcccatcctg

SEQ ID NO: 1715 - DNA, 20 bp, synthetic construct
  source 1..20: mol_type = other DNA
ggttgggtttcggttaaaac

SEQ ID NO: 1716 - DNA, 20 bp, synthetic construct
  source 1..20: mol_type = other DNA
gtttcggttaaaactggggt

SEQ ID NO: 1717 - DNA, 20 bp, synthetic construct
  source 1..20: mol_type = other DNA
gctgttgtgggagatgacgt

SEQ ID NO: 1718 - DNA, 20 bp, synthetic construct
  source 1..20: mol_type = other DNA
gacctcccaggcatatgcaa

SEQ ID NO: 1719 - DNA, 20 bp, synthetic construct
  source 1..20: mol_type = other DNA
ccgcgatctgcctagataca

SEQ ID NO: 1720 - DNA, 20 bp, synthetic construct
  source 1..20: mol_type = other DNA
aggcgccgggctcgtaccgg

SEQ ID NO: 1721 - DNA, 20 bp, synthetic construct
  source 1..20: mol_type = other DNA
tcagaaacccggcaggggaa

SEQ ID NO: 1722 - DNA, 20 bp, synthetic construct
  source 1..20: mol_type = other DNA
cattggtcactgctgccacc

SEQ ID NO: 1723 - DNA, 20 bp, synthetic construct
  source 1..20: mol_type = other DNA
gaaaccggggattgaatgga

SEQ ID NO: 1724 - DNA, 20 bp, synthetic construct
  source 1..20: mol_type = other DNA
cagaatctgattggtcaata

SEQ ID NO: 1725 - DNA, 20 bp, synthetic construct
  source 1..20: mol_type = other DNA
tgccggaagagaagaatcaa

SEQ ID NO: 1726 - DNA, 20 bp, synthetic construct
  source 1..20: mol_type = other DNA
caagagggggaagtccgggt

SEQ ID NO: 1727 - DNA, 20 bp, synthetic construct
  source 1..20: mol_type = other DNA
tcctcaccattgcatatgcc

SEQ ID NO: 1728 - DNA, 20 bp, synthetic construct
  source 1..20: mol_type = other DNA
tctacggtcctcagagctgc

SEQ ID NO: 1729 - DNA, 20 bp, synthetic construct
  source 1..20: mol_type = other DNA
tgttaccaggcagacttcag

SEQ ID NO: 1730 - DNA, 20 bp, synthetic construct
  source 1..20: mol_type = other DNA
gctccactttgcagaaaccg

SEQ ID NO: 1731 - DNA, 20 bp, synthetic construct
  source 1..20: mol_type = other DNA
agaaacccggcaggggaatg

SEQ ID NO: 1732 - DNA, 20 bp, synthetic construct
  source 1..20: mol_type = other DNA
gggtagcggaactcatgcgc

SEQ ID NO: 1733 - DNA, 20 bp, synthetic construct
  source 1..20: mol_type = other DNA
tgcagaaaccggggattgaa

SEQ ID NO: 1734 - DNA, 20 bp, synthetic construct
  source 1..20: mol_type = other DNA
agccggctgggccaggacct

SEQ ID NO: 1735 - DNA, 20 bp, synthetic construct
  source 1..20: mol_type = other DNA
gcctcaggatgggctgttgt

SEQ ID NO: 1736 - DNA, 20 bp, synthetic construct
  source 1..20: mol_type = other DNA
ggtgggggcgcgcctcagga

SEQ ID NO: 1737 - DNA, 20 bp, synthetic construct
  source 1..20: mol_type = other DNA
gtgggagatgacgtaggggc

SEQ ID NO: 1738 - DNA, 20 bp, synthetic construct
  source 1..20: mol_type = other DNA
cggttaaaactggggtcggt

SEQ ID NO: 1739 - DNA, 20 bp, synthetic construct
  source 1..20: mol_type = other DNA
caagaggttcttctcttaaa

SEQ ID NO: 1740 - DNA, 20 bp, synthetic construct
  source 1..20: mol_type = other DNA
tctgattggtcaatagggga

SEQ ID NO: 1741 - DNA, 20 bp, synthetic construct
  source 1..20: mol_type = other DNA
cgaacatattctgcccttct

SEQ ID NO: 1742 - DNA, 20 bp, synthetic construct
  source 1..20: mol_type = other DNA
aaccggggattgaatggagg

SEQ ID NO: 1743 - DNA, 20 bp, synthetic construct
  source 1..20: mol_type = other DNA
acctttattgttgcttgtgt

SEQ ID NO: 1744 - DNA, 20 bp, synthetic construct
  source 1..20: mol_type = other DNA
cctttaagagaagaacctct

SEQ ID NO: 1745 - DNA, 20 bp, synthetic construct
  source 1..20: mol_type = other DNA
ggtttctgcaaagtggagcg

SEQ ID NO: 1746 - DNA, 20 bp, synthetic construct
  source 1..20: mol_type = other DNA
gagggggaagggaaggaggt

SEQ ID NO: 1747 - DNA, 20 bp, synthetic construct
  source 1..20: mol_type = other DNA
gcgcccgttctttcatcctg

SEQ ID NO: 1748 - DNA, 20 bp, synthetic construct
  source 1..20: mol_type = other DNA
gactcaaataagaccaactt

SEQ ID NO: 1749 - DNA, 20 bp, synthetic construct
  source 1..20: mol_type = other DNA
acgcacgagccggctgggcc

SEQ ID NO: 1750 - DNA, 20 bp, synthetic construct
  source 1..20: mol_type = other DNA
gacgtaggggccggcgacgt

SEQ ID NO: 1751 - DNA, 20 bp, synthetic construct
  source 1..20: mol_type = other DNA
atatgcctgggaggtcagaa

SEQ ID NO: 1752 - DNA, 20 bp, synthetic construct
  source 1..20: mol_type = other DNA
ataactagacaatgatgggt

SEQ ID NO: 1753 - DNA, 20 bp, synthetic construct
  source 1..20: mol_type = other DNA
ttcacccatgtgcacgtgcc

SEQ ID NO: 1754 - DNA, 20 bp, synthetic construct
  source 1..20: mol_type = other DNA
ggcggccgctgaagtctgcc

SEQ ID NO: 1755 - DNA, 20 bp, synthetic construct
  source 1..20: mol_type = other DNA
aactgaaacacaaaagggga

SEQ ID NO: 1756 - DNA, 20 bp, synthetic construct
  source 1..20: mol_type = other DNA
ctgcaaagtggagcgggggt

SEQ ID NO: 1757 - DNA, 20 bp, synthetic construct
  source 1..20: mol_type = other DNA
ctgggaccccattcccctgc

SEQ ID NO: 1758 - DNA, 20 bp, synthetic construct
  source 1..20: mol_type = other DNA
gggattgaatggagggggaa

SEQ ID NO: 1759 - DNA, 20 bp, synthetic construct
  source 1..20: mol_type = other DNA
gagattaagtaatgagaact

SEQ ID NO: 1760 - DNA, 20 bp, synthetic construct
  source 1..20: mol_type = other DNA
ggaatggggtcccagattcc

SEQ ID NO: 1761 - DNA, 20 bp, synthetic construct
  source 1..20: mol_type = other DNA
gggccggcgacgtggggagg

SEQ ID NO: 1762 - DNA, 20 bp, synthetic construct
  source 1..20: mol_type = other DNA
ggagggggaagggaaggagg

SEQ ID NO: 1763 - DNA, 20 bp, synthetic construct
  source 1..20: mol_type = other DNA
taaaataactagacaatgat

SEQ ID NO: 1764 - DNA, 20 bp, synthetic construct
  source 1..20: mol_type = other DNA
aggggccggcgacgtgggga

SEQ ID NO: 1765 - DNA, 20 bp, synthetic construct
  source 1..20: mol_type = other DNA
tgacgtaggggccggcgacg

SEQ ID NO: 1766 - DNA, 20 bp, synthetic construct
  source 1..20: mol_type = other DNA
taggggccggcgacgtgggg

SEQ ID NO: 1767 - DNA, 20 bp, synthetic construct
  source 1..20: mol_type = other DNA
atgtgcacgtgcccggaatc

SEQ ID NO: 1768 - DNA, 20 bp, synthetic construct
  source 1..20: mol_type = other DNA
cgtatcctttctgacctccc

SEQ ID NO: 1769 - DNA, 20 bp, synthetic construct
  source 1..20: mol_type = other DNA
acaatgatgggtaggagtga

SEQ ID NO: 1770 - DNA, 20 bp, synthetic construct
  source 1..20: mol_type = other DNA
ccaagaggttcttctcttaa

SEQ ID NO: 1771 - DNA, 20 bp, synthetic construct
  source 1..20: mol_type = other DNA
gactaaactgaaacacaaaa

SEQ ID NO: 1772 - DNA, 20 bp, synthetic construct
  source 1..20: mol_type = other DNA
aagagggggaagtccgggtt

SEQ ID NO: 1773 - DNA, 20 bp, synthetic construct
  source 1..20: mol_type = other DNA
aggatgaaagaacgggcgct

SEQ ID NO: 1774 - DNA, 20 bp, synthetic construct
  source 1..20: mol_type = other DNA
caccattgcatatgcctggg

SEQ ID NO: 1775 - DNA, 20 bp, synthetic construct
  source 1..20: mol_type = other DNA
aaaccggggattgaatggag

SEQ ID NO: 1776 - DNA, 20 bp, synthetic construct
  source 1..20: mol_type = other DNA
agaatctgattggtcaatag

SEQ ID NO: 1777 - DNA, 20 bp, synthetic construct
  source 1..20: mol_type = other DNA
actaaactgaaacacaaaag

SEQ ID NO: 1778 - DNA, 20 bp, synthetic construct
  source 1..20: mol_type = other DNA
ggggattgaatggaggggga

SEQ ID NO: 1779 - DNA, 20 bp, synthetic construct
  source 1..20: mol_type = other DNA
agcggccgccggtacgagcc

SEQ ID NO: 1780 - DNA, 20 bp, synthetic construct
  source 1..20: mol_type = other DNA
cccaggcatatgcaatggtg

SEQ ID NO: 1781 - DNA, 20 bp, synthetic construct
  source 1..20: mol_type = other DNA
acgtaggggccggcgacgtg

SEQ ID NO: 1782 - DNA, 20 bp, synthetic construct
  source 1..20: mol_type = other DNA
cctcaccattgcatatgcct

SEQ ID NO: 1783 - DNA, 20 bp, synthetic construct
  source 1..20: mol_type = other DNA
tgttacaaccattcagaaaa

SEQ ID NO: 1784 - DNA, 20 bp, synthetic construct
  source 1..20: mol_type = other DNA
agattccgggcacgtgcaca

SEQ ID NO: 1785 - DNA, 20 bp, synthetic construct
  source 1..20: mol_type = other DNA
gcctggtaacagaatctgat

SEQ ID NO: 1786 - DNA, 20 bp, synthetic construct
  source 1..20: mol_type = other DNA
cgctccactttgcagaaacc

SEQ ID NO: 1787 - DNA, 20 bp, synthetic construct
  source 1..20: mol_type = other DNA
gacgtggggagggggagcag

SEQ ID NO: 1788 - DNA, 20 bp, synthetic construct
  source 1..20: mol_type = other DNA
atctgattggtcaatagggg

SEQ ID NO: 1789 - DNA, 20 bp, synthetic construct
  source 1..20: mol_type = other DNA
aaagcaacgcacgagccggc

SEQ ID NO: 1790 - DNA, 20 bp, synthetic construct
  source 1..20: mol_type = other DNA
cgtggggagggggagcagcg

SEQ ID NO: 1791 - DNA, 20 bp, synthetic construct
  source 1..20: mol_type = other DNA
atattctgcccttctaggct

SEQ ID NO: 1792 - DNA, 20 bp, synthetic construct
  source 1..20: mol_type = other DNA
tggtcttatttgagtcaaga

SEQ ID NO: 1793 - DNA, 20 bp, synthetic construct
  source 1..20: mol_type = other DNA
cgcctcaggatgggctgttg

SEQ ID NO: 1794 - DNA, 20 bp, synthetic construct
  source 1..20: mol_type = other DNA
ctaggcttggaaaaaaaact

SEQ ID NO: 1795 - DNA, 20 bp, synthetic construct
  source 1..20: mol_type = other DNA
ggggccggcgacgtggggag

SEQ ID NO: 1796 - DNA, 20 bp, synthetic construct
  source 1..20: mol_type = other DNA
tgcaaagtggagcgggggtg

SEQ ID NO: 1797 - DNA, 20 bp, synthetic construct
  source 1..20: mol_type = other DNA
ctgggcgtcagaaacccggc

SEQ ID NO: 1798 - DNA, 20 bp, synthetic construct
  source 1..20: mol_type = other DNA
aaactgaaacacaaaagggg

SEQ ID NO: 1799 - DNA, 20 bp, synthetic construct
  source 1..20: mol_type = other DNA
aatccccggtttctgcaaag

SEQ ID NO: 1800 - DNA, 20 bp, synthetic construct
  source 1..20: mol_type = other DNA
accaatcagattctgttacc

SEQ ID NO: 1801 - DNA, 20 bp, synthetic construct
  source 1..20: mol_type = other DNA
tctaggcttggaaaaaaaac

SEQ ID NO: 1802 - DNA, 20 bp, synthetic construct
  source 1..20: mol_type = other DNA
gctccccctccccacgtcgc

SEQ ID NO: 1803 - DNA, 20 bp, synthetic construct
  source 1..20: mol_type = other DNA
acgtggggagggggagcagc

SEQ ID NO: 1804 - DNA, 20 bp, synthetic construct
  source 1..20: mol_type = other DNA
gttttttttccaagcctaga

SEQ ID NO: 1805 - DNA, 20 bp, synthetic construct
  source 1..20: mol_type = other DNA
ataaaataactagacaatga

SEQ ID NO: 1806 - DNA, 20 bp, synthetic construct
  source 1..20: mol_type = other DNA
tctgcaaagtggagcggggg

SEQ ID NO: 1807 - DNA, 20 bp, synthetic construct
  source 1..20: mol_type = other DNA
agtggagcgggggtggggcg

SEQ ID NO: 1808 - DNA, 20 bp, synthetic construct
  source 1..20: mol_type = other DNA
ttgaatggagggggaaggga

SEQ ID NO: 1809 - DNA, 20 bp, synthetic construct
  source 1..20: mol_type = other DNA
ccggtttctgcaaagtggag

SEQ ID NO: 1810 - DNA, 20 bp, synthetic construct
  source 1..20: mol_type = other DNA
atccattgattcttctcttc

SEQ ID NO: 1811 - DNA, 20 bp, synthetic construct
  source 1..20: mol_type = other DNA
gtggggagggggagcagcgg

SEQ ID NO: 1812 - DNA, 20 bp, synthetic construct
  source 1..20: mol_type = other DNA
ccgctccactttgcagaaac

SEQ ID NO: 1813 - DNA, 20 bp, synthetic construct
  source 1..20: mol_type = other DNA
aggaggtgggggcgcgcctc

SEQ ID NO: 1814 - DNA, 20 bp, synthetic construct
  source 1..20: mol_type = other DNA
aggcagacttcagcggccgc

SEQ ID NO: 1815 - DNA, 20 bp, synthetic construct
  source 1..20: mol_type = other DNA
gcgggggtggggcggggtag

SEQ ID NO: 1816 - DNA, 20 bp, synthetic construct
  source 1..20: mol_type = other DNA
agactaaactgaaacacaaa

SEQ ID NO: 1817 - DNA, 20 bp, synthetic construct
  source 1..20: mol_type = other DNA
aaagtggagcgggggtgggg

SEQ ID NO: 1818 - DNA, 20 bp, synthetic construct
  source 1..20: mol_type = other DNA
acagaatctgattggtcaat

SEQ ID NO: 1819 - DNA, 20 bp, synthetic construct
  source 1..20: mol_type = other DNA
aaagaaaagacagttccaaa

SEQ ID NO: 1820 - DNA, 20 bp, synthetic construct
  source 1..20: mol_type = other DNA
aaaagaaaagacagttccaa

SEQ ID NO: 1821 - DNA, 20 bp, synthetic construct
  source 1..20: mol_type = other DNA
aagtggagcgggggtggggc

SEQ ID NO: 1822 - DNA, 20 bp, synthetic construct
  source 1..20: mol_type = other DNA
cggtttctgcaaagtggagc

SEQ ID NO: 1823 - DNA, 20 bp, synthetic construct
  source 1..20: mol_type = other DNA
aatggagggggaagggaagg

SEQ ID NO: 1824 - DNA, 20 bp, synthetic construct
  source 1..20: mol_type = other DNA
ggcggacctgttagacactt

SEQ ID NO: 1825 - DNA, 20 bp, synthetic construct
  source 1..20: mol_type = other DNA
cccttcgcacaggtacctaa

SEQ ID NO: 1826 - DNA, 20 bp, synthetic construct
  source 1..20: mol_type = other DNA
ggctagtttggaggatctag

SEQ ID NO: 1827 - DNA, 20 bp, synthetic construct
  source 1..20: mol_type = other DNA
ccgagttgtatttgcattga

SEQ ID NO: 1828 - DNA, 20 bp, synthetic construct
  source 1..20: mol_type = other DNA
gccgagttgtatttgcattg

SEQ ID NO: 1829 - DNA, 20 bp, synthetic construct
  source 1..20: mol_type = other DNA
ccctcaatgcaaatacaact

SEQ ID NO: 1830 - DNA, 20 bp, synthetic construct
  source 1..20: mol_type = other DNA
tgcaaatacaactcggccaa

SEQ ID NO: 1831 - DNA, 20 bp, synthetic construct
  source 1..20: mol_type = other DNA
atacaactcggccaaaggtg

SEQ ID NO: 1832 - DNA, 20 bp, synthetic construct
  source 1..20: mol_type = other DNA
agagggatgggccacacctt

SEQ ID NO: 1833 - DNA, 20 bp, synthetic construct
  source 1..20: mol_type = other DNA
atagtggagcggagagggat

SEQ ID NO: 1834 - DNA, 20 bp, synthetic construct
  source 1..20: mol_type = other DNA
aatagtggagcggagaggga

SEQ ID NO: 1835 - DNA, 20 bp, synthetic construct
  source 1..20: mol_type = other DNA
tgaaaatagtggagcggaga

SEQ ID NO: 1836 - DNA, 20 bp, synthetic construct
  source 1..20: mol_type = other DNA
ttgaaaatagtggagcggag

SEQ ID NO: 1837 - DNA, 20 bp, synthetic construct
  source 1..20: mol_type = other DNA
cttatttgaaaatagtggag

SEQ ID NO: 1838 - DNA, 20 bp, synthetic construct
  source 1..20: mol_type = other DNA
ggtggcttatttgaaaatag

SEQ ID NO: 1839 - DNA, 20 bp, synthetic construct
  source 1..20: mol_type = other DNA
gcagtccatgaaggcagagg

SEQ ID NO: 1840 - DNA, 20 bp, synthetic construct
  source 1..20: mol_type = other DNA
ctcgcagtccatgaaggcag

SEQ ID NO: 1841 - DNA, 20 bp, synthetic construct
  source 1..20: mol_type = other DNA
ataagccacctctgccttca

SEQ ID NO: 1842 - DNA, 20 bp, synthetic construct
  source 1..20: mol_type = other DNA
cactagctcgcagtccatga

SEQ ID NO: 1843 - DNA, 20 bp, synthetic construct
  source 1..20: mol_type = other DNA
gactgcgagctagtgactct

SEQ ID NO: 1844 - DNA, 20 bp, synthetic construct
  source 1..20: mol_type = other DNA
gatttgaagctgggatgcag

SEQ ID NO: 1845 - DNA, 20 bp, synthetic construct
  source 1..20: mol_type = other DNA
gcaaggggagatttgaagct

SEQ ID NO: 1846 - DNA, 20 bp, synthetic construct
  source 1..20: mol_type = other DNA
tgcaaggggagatttgaagc

SEQ ID NO: 1847 - DNA, 20 bp, synthetic construct
  source 1..20: mol_type = other DNA
agcttcaaatctccccttgc

SEQ ID NO: 1848 - DNA, 20 bp, synthetic construct
  source 1..20: mol_type = other DNA
ccccacaaactgcctgcaag

SEQ ID NO: 1849 - DNA, 20 bp, synthetic construct
  source 1..20: mol_type = other DNA
cccccacaaactgcctgcaa

SEQ ID NO: 1850 - DNA, 20 bp, synthetic construct
  source 1..20: mol_type = other DNA
tcccccacaaactgcctgca

SEQ ID NO: 1851 - DNA, 20 bp, synthetic construct
  source 1..20: mol_type = other DNA
ctccccttgcaggcagtttg

SEQ ID NO: 1852 - DNA, 20 bp, synthetic construct
  source 1..20: mol_type = other DNA
tccccttgcaggcagtttgt

SEQ ID NO: 1853 - DNA, 20 bp, synthetic construct
  source 1..20: mol_type = other DNA
ccccttgcaggcagtttgtg

SEQ ID NO: 1854 - DNA, 20 bp, synthetic construct
  source 1..20: mol_type = other DNA
cccttgcaggcagtttgtgg

SEQ ID NO: 1855 - DNA, 20 bp, synthetic construct
  source 1..20: mol_type = other DNA
gtctcacgacttgtagtgtt

SEQ ID NO: 1856 - DNA, 20 bp, synthetic construct
  source 1..20: mol_type = other DNA
tacaagtcgtgagaccgctc

SEQ ID NO: 1857 - DNA, 20 bp, synthetic construct
  source 1..20: mol_type = other DNA
aaattaggattgttcctgag

SEQ ID NO: 1858 - DNA, 20 bp, synthetic construct
  source 1..20: mol_type = other DNA
ggagttccagtatgcaaatt

SEQ ID NO: 1859 - DNA, 20 bp, synthetic construct
  source 1..20: mol_type = other DNA
aacaatcctaatttgcatac

SEQ ID NO: 1860 - DNA, 20 bp, synthetic construct
  source 1..20: mol_type = other DNA
cggttcaaagtatcttctac

SEQ ID NO: 1861 - DNA, 20 bp, synthetic construct
  source 1..20: mol_type = other DNA
tgatcctattgtatctaaag

SEQ ID NO: 1862 - DNA, 20 bp, synthetic construct
  source 1..20: mol_type = other DNA
tgaaccgctttagatacaat

SEQ ID NO: 1863 - DNA, 20 bp, synthetic construct
  source 1..20: mol_type = other DNA
gctttagatacaataggatc

SEQ ID NO: 1864 - DNA, 20 bp, synthetic construct
  source 1..20: mol_type = other DNA
tacaataggatcaggtaaaa

SEQ ID NO: 1865 - DNA, 20 bp, synthetic construct
  source 1..20: mol_type = other DNA
aaaacctgcagtggctggca

SEQ ID NO: 1866 - DNA, 20 bp, synthetic construct
  source 1..20: mol_type = other DNA
aggtgaaaacctgcagtggc

SEQ ID NO: 1867 - DNA, 20 bp, synthetic construct
  source 1..20: mol_type = other DNA
gctgccttgccagccactgc

SEQ ID NO: 1868 - DNA, 20 bp, synthetic construct
  source 1..20: mol_type = other DNA
tgtcaggtgaaaacctgcag

SEQ ID NO: 1869 - DNA, 20 bp, synthetic construct
  source 1..20: mol_type = other DNA
cagggtctgggggctgtgtc

SEQ ID NO: 1870 - DNA, 20 bp, synthetic construct
  source 1..20: mol_type = other DNA
gattcgtagacagggtctgg

SEQ ID NO: 1871 - DNA, 20 bp, synthetic construct
  source 1..20: mol_type = other DNA
ggattcgtagacagggtctg

SEQ ID NO: 1872 - DNA, 20 bp, synthetic construct
  source 1..20: mol_type = other DNA
gggattcgtagacagggtct

SEQ ID NO: 1873 - DNA, 20 bp, synthetic construct
  source 1..20: mol_type = other DNA
ggggattcgtagacagggtc

SEQ ID NO: 1874 - DNA, 20 bp, synthetic construct
  source 1..20: mol_type = other DNA
agctgggggattcgtagaca

SEQ ID NO: 1875 - DNA, 20 bp, synthetic construct
  source 1..20: mol_type = other DNA
cagctgggggattcgtagac

SEQ ID NO: 1876 - DNA, 20 bp, synthetic construct
  source 1..20: mol_type = other DNA
ctgtctacgaatcccccagc

SEQ ID NO: 1877 - DNA, 20 bp, synthetic construct
  source 1..20: mol_type = other DNA
cggccccttcggccagctgg

SEQ ID NO: 1878 - DNA, 20 bp, synthetic construct
  source 1..20: mol_type = other DNA
gcggccccttcggccagctg

SEQ ID NO: 1879 - DNA, 20 bp, synthetic construct
  source 1..20: mol_type = other DNA
cgcggccccttcggccagct

SEQ ID NO: 1880 - DNA, 20 bp, synthetic construct
  source 1..20: mol_type = other DNA
ccgcggccccttcggccagc

SEQ ID NO: 1881 - DNA, 20 bp, synthetic construct
  source 1..20: mol_type = other DNA
cgaatcccccagctggccga

SEQ ID NO: 1882 - DNA, 20 bp, synthetic construct
  source 1..20: mol_type = other DNA
gaatcccccagctggccgaa

SEQ ID NO: 1883 - DNA, 20 bp, synthetic construct
  source 1..20: mol_type = other DNA
aatcccccagctggccgaag

SEQ ID NO: 1884 - DNA, 20 bp, synthetic construct
  source 1..20: mol_type = other DNA
atgtgcggccgcggcccctt

SEQ ID NO: 1885 - DNA, 20 bp, synthetic construct
  source 1..20: mol_type = other DNA
ccagctggccgaaggggccg

SEQ ID NO: 1886 - DNA, 20 bp, synthetic construct
  source 1..20: mol_type = other DNA
tgactgcgcatgtgcggccg

SEQ ID NO: 1887 - DNA, 20 bp, synthetic construct
  source 1..20: mol_type = other DNA
cgggactgactgcgcatgtg

SEQ ID NO: 1888 - DNA, 20 bp, synthetic construct
  source 1..20: mol_type = other DNA
acatgcgcagtcagtcccgt

SEQ ID NO: 1889 - DNA, 20 bp, synthetic construct
  source 1..20: mol_type = other DNA
gggctgagcgcacaaccaac

SEQ ID NO: 1890 - DNA, 20 bp, synthetic construct
  source 1..20: mol_type = other DNA
ggggctgagcgcacaaccaa

SEQ ID NO: 1891 - DNA, 20 bp, synthetic construct
  source 1..20: mol_type = other DNA
gcgcggcgcctctgggggcg

SEQ ID NO: 1892 - DNA, 20 bp, synthetic construct
  source 1..20: mol_type = other DNA
agcgcggcgcctctgggggc

SEQ ID NO: 1893 - DNA, 20 bp, synthetic construct
  source 1..20: mol_type = other DNA
gagcgcggcgcctctggggg

SEQ ID NO: 1894 - DNA, 20 bp, synthetic construct
  source 1..20: mol_type = other DNA
gcgctcagccccgcccccag

SEQ ID NO: 1895 - DNA, 20 bp, synthetic construct
  source 1..20: mol_type = other DNA
agggagcgcggcgcctctgg

SEQ ID NO: 1896 - DNA, 20 bp, synthetic construct
  source 1..20: mol_type = other DNA
cagggagcgcggcgcctctg

SEQ ID NO: 1897 - DNA, 20 bp, synthetic construct
  source 1..20: mol_type = other DNA
tcagggagcgcggcgcctct

SEQ ID NO: 1898 - DNA, 20 bp, synthetic construct
  source 1..20: mol_type = other DNA
gtcagggagcgcggcgcctc

SEQ ID NO: 1899 - DNA, 20 bp, synthetic construct
  source 1..20: mol_type = other DNA
ccgcgggctgtcagggagcg

SEQ ID NO: 1900 - DNA, 20 bp, synthetic construct
  source 1..20: mol_type = other DNA
tgtacgcccgcgggctgtca

SEQ ID NO: 1901 - DNA, 20 bp, synthetic construct
  source 1..20: mol_type = other DNA
gtgtacgcccgcgggctgtc

SEQ ID NO: 1902 - DNA, 20 bp, synthetic construct
  source 1..20: mol_type = other DNA
ccgcgctccctgacagcccg

SEQ ID NO: 1903 - DNA, 20 bp, synthetic construct
  source 1..20: mol_type = other DNA
cgcgctccctgacagcccgc

SEQ ID NO: 1904 - DNA, 20 bp, synthetic construct
  source 1..20: mol_type = other DNA
gtcagcgtgtgtacgcccgc

SEQ ID NO: 1905 - DNA, 20 bp, synthetic construct
  source 1..20: mol_type = other DNA
cgtcagcgtgtgtacgcccg

SEQ ID NO: 1906 - DNA, 20 bp, synthetic construct
  source 1..20: mol_type = other DNA
gcgtacacacgctgacgcgc

SEQ ID NO: 1907 - DNA, 20 bp, synthetic construct
  source 1..20: mol_type = other DNA
acacgctgacgcgcaggctg

SEQ ID NO: 1908 - DNA, 20 bp, synthetic construct
  source 1..20: mol_type = other DNA
cgcgcaggctgcggtcgcgc

SEQ ID NO: 1909 - DNA, 20 bp, synthetic construct
  source 1..20: mol_type = other DNA
tgcggtcgcgcaggcgcagt

SEQ ID NO: 1910 - DNA, 20 bp, synthetic construct
  source 1..20: mol_type = other DNA
gcggtcgcgcaggcgcagtc

SEQ ID NO: 1911 - DNA, 20 bp, synthetic construct
  source 1..20: mol_type = other DNA
cggtcgcgcaggcgcagtcg

SEQ ID NO: 1912 - DNA, 20 bp, synthetic construct
  source 1..20: mol_type = other DNA
gcgcagtcggggcgccttcc

SEQ ID NO: 1913 - DNA, 20 bp, synthetic construct
  source 1..20: mol_type = other DNA
aaaaggcgcctataccggga

SEQ ID NO: 1914 - DNA, 20 bp, synthetic construct
  source 1..20: mol_type = other DNA
tcggggcgccttcccggtat

SEQ ID NO: 1915 - DNA, 20 bp, synthetic construct
  source 1..20: mol_type = other DNA
gggtaaaaggcgcctatacc

SEQ ID NO: 1916 - DNA, 20 bp, synthetic construct
  source 1..20: mol_type = other DNA
ggggtaaaaggcgcctatac

SEQ ID NO: 1917 - DNA, 20 bp, synthetic construct
  source 1..20: mol_type = other DNA
tcaggacacgctggggtaaa

SEQ ID NO: 1918 - DNA, 20 bp, synthetic construct
  source 1..20: mol_type = other DNA
caaagactcaggacacgctg

SEQ ID NO: 1919 - DNA, 20 bp, synthetic construct
  source 1..20: mol_type = other DNA
ccaaagactcaggacacgct

SEQ ID NO: 1920 - DNA, 20 bp, synthetic construct
  source 1..20: mol_type = other DNA
accaaagactcaggacacgc

SEQ ID NO: 1921 - DNA, 20 bp, synthetic construct
  source 1..20: mol_type = other DNA
acttcgcgaaccaaagactc

SEQ ID NO: 1922 - DNA, 20 bp, synthetic construct
  source 1..20: mol_type = other DNA
cccagcgtgtcctgagtctt

SEQ ID NO: 1923 - DNA, 20 bp, synthetic construct
  source 1..20: mol_type = other DNA
ttggttcgcgaagtgccgtt

SEQ ID NO: 1924 - DNA, 20 bp, synthetic construct
  source 1..20: mol_type = other DNA
ttagcacctgcttggcctaa

SEQ ID NO: 1925 - DNA, 20 bp, synthetic construct
  source 1..20: mol_type = other DNA
gaagtgccgttaggccaagc

SEQ ID NO: 1926 - DNA, 20 bp, synthetic construct
  source 1..20: mol_type = other DNA
ccgggcttttagcacctgct

SEQ ID NO: 1927 - DNA, 20 bp, synthetic construct
  source 1..20: mol_type = other DNA
ccaagcaggtgctaaaagcc

SEQ ID NO: 1928 - DNA, 20 bp, synthetic construct
  source 1..20: mol_type = other DNA
caagcaggtgctaaaagccc

SEQ ID NO: 1929 - DNA, 20 bp, synthetic construct
  source 1..20: mol_type = other DNA
aagcaggtgctaaaagcccg

SEQ ID NO: 1930 - DNA, 20 bp, synthetic construct
  source 1..20: mol_type = other DNA
tggccggggtccacgacccc

SEQ ID NO: 1931 - DNA, 20 bp, synthetic construct
  source 1..20: mol_type = other DNA
gtgctaaaagcccggggtcg

SEQ ID NO: 1932 - DNA, 20 bp, synthetic construct
  source 1..20: mol_type = other DNA
ctggccggggtccacgaccc

SEQ ID NO: 1933 - DNA, 20 bp, synthetic construct
  source 1..20: mol_type = other DNA
aagcccggggtcgtggaccc

SEQ ID NO: 1934 - DNA, 20 bp, synthetic construct
  source 1..20: mol_type = other DNA
cggggtcgtggaccccggcc

SEQ ID NO: 1935 - DNA, 20 bp, synthetic construct
  source 1..20: mol_type = other DNA
atgctgctaagacctggccg

SEQ ID NO: 1936 - DNA, 20 bp, synthetic construct
  source 1..20: mol_type = other DNA
catgctgctaagacctggcc

SEQ ID NO: 1937 - DNA, 20 bp, synthetic construct
  source 1..20: mol_type = other DNA
ccatgctgctaagacctggc

SEQ ID NO: 1938 - DNA, 20 bp, synthetic construct
  source 1..20: mol_type = other DNA
gcctccatgctgctaagacc

SEQ ID NO: 1939 - DNA, 20 bp, synthetic construct
  source 1..20: mol_type = other DNA
ccggccaggtcttagcagca

SEQ ID NO: 1940 - DNA, 20 bp, synthetic construct
  source 1..20: mol_type = other DNA
gccaggtcttagcagcatgg

SEQ ID NO: 1941 - DNA, 20 bp, synthetic construct
  source 1..20: mol_type = other DNA
tcttagcagcatggaggcgc

SEQ ID NO: 1942 - DNA, 20 bp, synthetic construct
  source 1..20: mol_type = other DNA
cttagcagcatggaggcgca

SEQ ID NO: 1943 - DNA, 20 bp, synthetic construct
  source 1..20: mol_type = other DNA
catggaggcgcagggtgtag

SEQ ID NO: 1944 - DNA, 20 bp, synthetic construct
  source 1..20: mol_type = other DNA
ggaggcgcagggtgtagcgg

SEQ ID NO: 1945 - DNA, 20 bp, synthetic construct
  source 1..20: mol_type = other DNA
gaggcgcagggtgtagcgga

SEQ ID NO: 1946 - DNA, 20 bp, synthetic construct
  source 1..20: mol_type = other DNA
gcagggtgtagcggagggcg

SEQ ID NO: 1947 - DNA, 20 bp, synthetic construct
  source 1..20: mol_type = other DNA
cagggtgtagcggagggcgc

SEQ ID NO: 1948 - DNA, 20 bp, synthetic construct
  source 1..20: mol_type = other DNA
agggtgtagcggagggcgcg

SEQ ID NO: 1949 - DNA, 20 bp, synthetic construct
  source 1..20: mol_type = other DNA
tgtagcggagggcgcggggc

SEQ ID NO: 1950 - DNA, 20 bp, synthetic construct
  source 1..20: mol_type = other DNA
gtagcggagggcgcggggcc

SEQ ID NO: 1951 - DNA, 20 bp, synthetic construct
  source 1..20: mol_type = other DNA
ggcacgccgctggcggcgcc

SEQ ID NO: 1952 - DNA, 20 bp, synthetic construct
  source 1..20: mol_type = other DNA
gcggggccgggcgccgccag

SEQ ID NO: 1953 - DNA, 20 bp, synthetic construct
  source 1..20: mol_type = other DNA
ggggtggggcacgccgctgg

SEQ ID NO: 1954 - DNA, 20 bp, synthetic construct
  source 1..20: mol_type = other DNA
cgcggggtggggcacgccgc

SEQ ID NO: 1955 - DNA, 20 bp, synthetic construct
  source 1..20: mol_type = other DNA
ggggctagggccgcggggtg

SEQ ID NO: 1956 - DNA, 20 bp, synthetic construct
  source 1..20: mol_type = other DNA
cagcggcgtgccccaccccg

SEQ ID NO: 1957 - DNA, 20 bp, synthetic construct
  source 1..20: mol_type = other DNA
cggggctagggccgcggggt

SEQ ID NO: 1958 - DNA, 20 bp, synthetic construct
  source 1..20: mol_type = other DNA
ccggggctagggccgcgggg

SEQ ID NO: 1959 - DNA, 20 bp, synthetic construct
  source 1..20: mol_type = other DNA
cagccggggctagggccgcg

SEQ ID NO: 1960 - DNA, 20 bp, synthetic construct
  source 1..20: mol_type = other DNA
gcagccggggctagggccgc

SEQ ID NO: 1961 - DNA, 20 bp, synthetic construct
  source 1..20: mol_type = other DNA
cgcagccggggctagggccg

SEQ ID NO: 1962 - DNA, 20 bp, synthetic construct
  source 1..20: mol_type = other DNA
ccaccccgcggccctagccc

SEQ ID NO: 1963 - DNA, 20 bp, synthetic construct
  source 1..20: mol_type = other DNA
gggagccgcagccggggcta

SEQ ID NO: 1964 - DNA, 20 bp, synthetic construct
  source 1..20: mol_type = other DNA
tgggagccgcagccggggct

SEQ ID NO: 1965 - DNA, 20 bp, synthetic construct
  source 1..20: mol_type = other DNA
cgcggccctagccccggctg

SEQ ID NO: 1966 - DNA, 20 bp, synthetic construct
  source 1..20: mol_type = other DNA
caaggtgggagccgcagccg

SEQ ID NO: 1967 - DNA, 20 bp, synthetic construct
  source 1..20: mol_type = other DNA
ccaaggtgggagccgcagcc

SEQ ID NO: 1968 - DNA, 20 bp, synthetic construct
  source 1..20: mol_type = other DNA
gccaaggtgggagccgcagc

SEQ ID NO: 1969 - DNA, 20 bp, synthetic construct
  source 1..20: mol_type = other DNA
cccggctgcggctcccacct

SEQ ID NO: 1970 - DNA, 20 bp, synthetic construct
  source 1..20: mol_type = other DNA
accgaggctggcgccaaggt

SEQ ID NO: 1971 - DNA, 20 bp, synthetic construct
  source 1..20: mol_type = other DNA
caccgaggctggcgccaagg

SEQ ID NO: 1972 - DNA, 20 bp, synthetic construct
  source 1..20: mol_type = other DNA
cgccaccgaggctggcgcca

SEQ ID NO: 1973 - DNA, 20 bp, synthetic construct
  source 1..20: mol_type = other DNA
tcccaccttggcgccagcct

SEQ ID NO: 1974 - DNA, 20 bp, synthetic construct
  source 1..20: mol_type = other DNA
gccgcggccgccaccgaggc

SEQ ID NO: 1975 - DNA, 20 bp, synthetic construct
  source 1..20: mol_type = other DNA
caccttggcgccagcctcgg

SEQ ID NO: 1976 - DNA, 20 bp, synthetic construct
  source 1..20: mol_type = other DNA
cttggcgccagcctcggtgg

SEQ ID NO: 1977 - DNA, 20 bp, synthetic construct
  source 1..20: mol_type = other DNA
agaggccgcggccgccaccg

SEQ ID NO: 1978 - DNA, 20 bp, synthetic construct
  source 1..20: mol_type = other DNA
gccagcctcggtggcggccg

SEQ ID NO: 1979 - DNA, 20 bp, synthetic construct
  source 1..20: mol_type = other DNA
cagggtgaattgagaggccg

SEQ ID NO: 1980 - DNA, 20 bp, synthetic construct
  source 1..20: mol_type = other DNA
cactagcagggtgaattgag

SEQ ID NO: 1981 - DNA, 20 bp, synthetic construct
  source 1..20: mol_type = other DNA
acagggttgcatcactagca

SEQ ID NO: 1982 - DNA, 20 bp, synthetic construct
  source 1..20: mol_type = other DNA
cacagggttgcatcactagc

SEQ ID NO: 1983 - DNA, 20 bp, synthetic construct
  source 1..20: mol_type = other DNA
ctagtgatgcaaccctgtgc

SEQ ID NO: 1984 - DNA, 20 bp, synthetic construct
  source 1..20: mol_type = other DNA
tagtgatgcaaccctgtgct

SEQ ID NO: 1985 - DNA, 20 bp, synthetic construct
  source 1..20: mol_type = other DNA
gcctcgtcctgcccagcaca

SEQ ID NO: 1986 - DNA, 20 bp, synthetic construct
  source 1..20: mol_type = other DNA
agcctcgtcctgcccagcac

SEQ ID NO: 1987 - DNA, 20 bp, synthetic construct
  source 1..20: mol_type = other DNA
gatgcaaccctgtgctgggc

SEQ ID NO: 1988 - DNA, 20 bp, synthetic construct
  source 1..20: mol_type = other DNA
accctgtgctgggcaggacg

SEQ ID NO: 1989 - DNA, 20 bp, synthetic construct
  source 1..20: mol_type = other DNA
tgctgggcaggacgaggctg

SEQ ID NO: 1990 - DNA, 20 bp, synthetic construct
  source 1..20: mol_type = other DNA
caggacgaggctgcggcccc

SEQ ID NO: 1991 - DNA, 20 bp, synthetic construct
  source 1..20: mol_type = other DNA
aggacgaggctgcggccccc

SEQ ID NO: 1992 - DNA, 20 bp, synthetic construct
  source 1..20: mol_type = other DNA
ggacgaggctgcggcccccg

SEQ ID NO: 1993 - DNA, 20 bp, synthetic construct
  source 1..20: mol_type = other DNA
gacgaggctgcggcccccgg

SEQ ID NO: 1994 - DNA, 20 bp, synthetic construct
  source 1..20: mol_type = other DNA
cgccccaacgctgcccccgg

SEQ ID NO: 1995 - DNA, 20 bp, synthetic construct
  source 1..20: mol_type = other DNA
ccgccccaacgctgcccccg

SEQ ID NO: 1996 - DNA, 20 bp, synthetic construct
  source 1..20: mol_type = other DNA
cccgccccaacgctgccccc

SEQ ID NO: 1997 - DNA, 20 bp, synthetic construct
  source 1..20: mol_type = other DNA
gcccgccccaacgctgcccc

SEQ ID NO: 1998 - DNA, 20 bp, synthetic construct
  source 1..20: mol_type = other DNA
gcggcccccgggggcagcgt

SEQ ID NO: 1999 - DNA, 20 bp, synthetic construct
  source 1..20: mol_type = other DNA
cggcccccgggggcagcgtt

SEQ ID NO: 2000 - DNA, 20 bp, synthetic construct
  source 1..20: mol_type = other DNA
ggcccccgggggcagcgttg

SEQ ID NO: 2001 - DNA, 20 bp, synthetic construct
  source 1..20: mol_type = other DNA
ccccgggggcagcgttgggg

SEQ ID NO: 2002 - DNA, 20 bp, synthetic construct
  source 1..20: mol_type = other DNA
cccgggggcagcgttggggc

SEQ ID NO: 2003 - DNA, 20 bp, synthetic construct
  source 1..20: mol_type = other DNA
ttggggcgggcaagcccgtt

SEQ ID NO: 2004 - DNA, 20 bp, synthetic construct
  source 1..20: mol_type = other DNA
ccttcgcacaggtacctaac

SEQ ID NO: 2005 - DNA, 20 bp, synthetic construct
  source 1..20: mol_type = other DNA
cccgttaggtacctgtgcga

SEQ ID NO: 2006 - DNA, 20 bp, synthetic construct
  source 1..20: mol_type = other DNA
catccccggccccttcgcac

SEQ ID NO: 2007 - DNA, 20 bp, synthetic construct
  source 1..20: mol_type = other DNA
ccgttaggtacctgtgcgaa

SEQ ID NO: 2008 - DNA, 20 bp, synthetic construct
  source 1..20: mol_type = other DNA
cgttaggtacctgtgcgaag

SEQ ID NO: 2009 - DNA, 20 bp, synthetic construct
  source 1..20: mol_type = other DNA
aggtacctgtgcgaaggggc

SEQ ID NO: 2010 - DNA, 20 bp, synthetic construct
  source 1..20: mol_type = other DNA
ggtacctgtgcgaaggggcc

SEQ ID NO: 2011 - DNA, 20 bp, synthetic construct
  source 1..20: mol_type = other DNA
gtacctgtgcgaaggggccg

SEQ ID NO: 2012 - DNA, 20 bp, synthetic construct
  source 1..20: mol_type = other DNA
ctgtgcgaaggggccgggga

SEQ ID NO: 2013 - DNA, 20 bp, synthetic construct
  source 1..20: mol_type = other DNA
agcctcctcttcgccatccc

SEQ ID NO: 2014 - DNA, 20 bp, synthetic construct
  source 1..20: mol_type = other DNA
aggggccggggatggcgaag

SEQ ID NO: 2015 - DNA, 20 bp, synthetic construct
  source 1..20: mol_type = other DNA
ggccggggatggcgaagagg

SEQ ID NO: 2016 - DNA, 20 bp, synthetic construct
  source 1..20: mol_type = other DNA
ggggatggcgaagaggaggc

SEQ ID NO: 2017 - DNA, 20 bp, synthetic construct
  source 1..20: mol_type = other DNA
gggatggcgaagaggaggct

SEQ ID NO: 2018 - DNA, 20 bp, synthetic construct
  source 1..20: mol_type = other DNA
ggatggcgaagaggaggctg

SEQ ID NO: 2019 - DNA, 20 bp, synthetic construct
  source 1..20: mol_type = other DNA
tggcgaagaggaggctgggg

SEQ ID NO: 2020 - DNA, 20 bp, synthetic construct
  source 1..20: mol_type = other DNA
agaggaggctggggaggacg

SEQ ID NO: 2021 - DNA, 20 bp, synthetic construct
  source 1..20: mol_type = other DNA
ggaggctggggaggacgagg

SEQ ID NO: 2022 - DNA, 20 bp, synthetic construct
  source 1..20: mol_type = other DNA
gagggtccgaagtgtctaac

SEQ ID NO: 2023 - DNA, 20 bp, synthetic construct
  source 1..20: mol_type = other DNA
gttagacacttcggaccctc

SEQ ID NO: 2024 - DNA, 20 bp, synthetic construct
  source 1..20: mol_type = other DNA
ttagacacttcggaccctcc

SEQ ID NO: 2025 - DNA, 20 bp, synthetic construct
  source 1..20: mol_type = other DNA
tagacacttcggaccctccg

SEQ ID NO: 2026 - DNA, 20 bp, synthetic construct
  source 1..20: mol_type = other DNA
agacacttcggaccctccgg

SEQ ID NO: 2027 - DNA, 20 bp, synthetic construct
  source 1..20: mol_type = other DNA
gacacttcggaccctccggg

SEQ ID NO: 2028 - DNA, 20 bp, synthetic construct
  source 1..20: mol_type = other DNA
cgctctcgcctccccccgga

SEQ ID NO: 2029 - DNA, 20 bp, synthetic construct
  source 1..20: mol_type = other DNA
gcgctctcgcctccccccgg

SEQ ID NO: 2030 - DNA, 20 bp, synthetic construct
  source 1..20: mol_type = other DNA
acttcggaccctccgggggg

SEQ ID NO: 2031 - DNA, 20 bp, synthetic construct
  source 1..20: mol_type = other DNA
gccgcgctctcgcctccccc

SEQ ID NO: 2032 - DNA, 20 bp, synthetic construct
  source 1..20: mol_type = other DNA
tccggggggaggcgagagcg

SEQ ID NO: 2033 - DNA, 20 bp, synthetic construct
  source 1..20: mol_type = other DNA
aggcgagagcgcggctagtt

SEQ ID NO: 2034 - DNA, 20 bp, synthetic construct
  source 1..20: mol_type = other DNA
cgagagcgcggctagtttgg

SEQ ID NO: 2035 - DNA, 20 bp, synthetic construct
  source 1..20: mol_type = other DNA
tttggaggatctagaggacg

SEQ ID NO: 2036 - DNA, 20 bp, synthetic construct
  source 1..20: mol_type = other DNA
agaggacgaggagactcact

SEQ ID NO: 2037 - DNA, 20 bp, synthetic construct
  source 1..20: mol_type = other DNA
gaggacgaggagactcactc

SEQ ID NO: 2038 - DNA, 20 bp, synthetic construct
  source 1..20: mol_type = other DNA
aggacgaggagactcactcg

SEQ ID NO: 2039 - DNA, 20 bp, synthetic construct
  source 1..20: mol_type = other DNA
ggacgaggagactcactcgg

SEQ ID NO: 2040 - DNA, 20 bp, synthetic construct
  source 1..20: mol_type = other DNA
gacgaggagactcactcggg

SEQ ID NO: 2041 - DNA, 20 bp, synthetic construct
  source 1..20: mol_type = other DNA
acttcgataatgaacttgca

SEQ ID NO: 2042 - DNA, 20 bp, synthetic construct
  source 1..20: mol_type = other DNA
aaacgcatcctggacccacg

SEQ ID NO: 2043 - DNA, 20 bp, synthetic construct
  source 1..20: mol_type = other DNA
ccatcagtaatgtccctctc

SEQ ID NO: 2044 - DNA, 20 bp, synthetic construct
  source 1..20: mol_type = other DNA
cctgagagggacattactga

SEQ ID NO: 2045 - DNA, 20 bp, synthetic construct
  source 1..20: mol_type = other DNA
gtgggggaagggacctgaga

SEQ ID NO: 2046 - DNA, 20 bp, synthetic construct
  source 1..20: mol_type = other DNA
ggtgggggaagggacctgag

SEQ ID NO: 2047 - DNA, 20 bp, synthetic construct
  source 1..20: mol_type = other DNA
ggtcccttcccccacccacc

SEQ ID NO: 2048 - DNA, 20 bp, synthetic construct
  source 1..20: mol_type = other DNA
actccaggtgggtgggggaa

SEQ ID NO: 2049 - DNA, 20 bp, synthetic construct
  source 1..20: mol_type = other DNA
tactccaggtgggtggggga

SEQ ID NO: 2050 - DNA, 20 bp, synthetic construct
  source 1..20: mol_type = other DNA
aggctactccaggtgggtgg

SEQ ID NO: 2051 - DNA, 20 bp, synthetic construct
  source 1..20: mol_type = other DNA
aaggctactccaggtgggtg

SEQ ID NO: 2052 - DNA, 20 bp, synthetic construct
  source 1..20: mol_type = other DNA
taaggctactccaggtgggt

SEQ ID NO: 2053 - DNA, 20 bp, synthetic construct
  source 1..20: mol_type = other DNA
gtaaggctactccaggtggg

SEQ ID NO: 2054 - DNA, 20 bp, synthetic construct
  source 1..20: mol_type = other DNA
aaggtaaggctactccaggt

SEQ ID NO: 2055 - DNA, 20 bp, synthetic construct
  source 1..20: mol_type = other DNA
caaggtaaggctactccagg

SEQ ID NO: 2056 - DNA, 20 bp, synthetic construct
  source 1..20: mol_type = other DNA
tcgcaaggtaaggctactcc

SEQ ID NO: 2057 - DNA, 20 bp, synthetic construct
  source 1..20: mol_type = other DNA
tagccttaccttgcgagaga

SEQ ID NO: 2058 - DNA, 20 bp, synthetic construct
  source 1..20: mol_type = other DNA
agccttaccttgcgagagaa

SEQ ID NO: 2059 - DNA, 20 bp, synthetic construct
  source 1..20: mol_type = other DNA
tacccttctctcgcaaggta

SEQ ID NO: 2060 - DNA, 20 bp, synthetic construct
  source 1..20: mol_type = other DNA
ctggctacccttctctcgca

SEQ ID NO: 2061 - DNA, 20 bp, synthetic construct
  source 1..20: mol_type = other DNA
agagaagggtagccagtacc

SEQ ID NO: 2062 - DNA, 20 bp, synthetic construct
  source 1..20: mol_type = other DNA
gtttctctctggcctggtac

SEQ ID NO: 2063 - DNA, 20 bp, synthetic construct
  source 1..20: mol_type = other DNA
tagcacgtttctctctggcc

SEQ ID NO: 2064 - DNA, 20 bp, synthetic construct
  source 1..20: mol_type = other DNA
gaacatagcacgtttctctc

SEQ ID NO: 2065 - DNA, 20 bp, synthetic construct
  source 1..20: mol_type = other DNA
tgctatgttccatctcccag

SEQ ID NO: 2066 - DNA, 20 bp, synthetic construct
  source 1..20: mol_type = other DNA
ggatgagttccgctgggaga

SEQ ID NO: 2067 - DNA, 20 bp, synthetic construct
  source 1..20: mol_type = other DNA
tctactggatgagttccgct

SEQ ID NO: 2068 - DNA, 20 bp, synthetic construct
  source 1..20: mol_type = other DNA
atctactggatgagttccgc

SEQ ID NO: 2069 - DNA, 20 bp, synthetic construct
  source 1..20: mol_type = other DNA
ctcatccagtagataaagcc

SEQ ID NO: 2070 - DNA, 20 bp, synthetic construct
  source 1..20: mol_type = other DNA
ggtgacctggctttatctac

SEQ ID NO: 2071 - DNA, 20 bp, synthetic construct
  source 1..20: mol_type = other DNA
aggctgatagttcggtgacc

SEQ ID NO: 2072 - DNA, 20 bp, synthetic construct
  source 1..20: mol_type = other DNA
aggtcaccgaactatcagcc

SEQ ID NO: 2073 - DNA, 20 bp, synthetic construct
  source 1..20: mol_type = other DNA
cgcgagcacagctaaggcca

SEQ ID NO: 2074 - DNA, 20 bp, synthetic construct
  source 1..20: mol_type = other DNA
gcgccccagcttgggacacc

SEQ ID NO: 2075 - DNA, 20 bp, synthetic construct
  source 1..20: mol_type = other DNA
ggggagggcagctctcaccc

SEQ ID NO: 2076 - DNA, 20 bp, synthetic construct
  source 1..20: mol_type = other DNA
agtctagctgctgcacaggc

SEQ ID NO: 2077 - protein, 4 aa, synthetic construct
WRPW

SEQ ID NO: 2078 - protein, 30 aa, synthetic construct
  VARIANT 2..30: note = may be absent
GGGGGGGGGGGGGGGGGGGGGGGGGGGGGG

SEQ ID NO: 2079 - protein, 60 aa, synthetic construct
  VARIANT 3..60: note = Up to 29 copies of XP may be absent
XPXPXPXPXPXPXPXPXPXPXPXPXPXPXPXPXPXPXPXPXPXPXPXPXPXPXPXPXPXP

SEQ ID NO: 2080 - protein, 21 aa, synthetic construct
  VARIANT 4..21: note = Up to 6 copies of GGS may be absent
GGSGGSGGSGGSGGSGGSGGS

SEQ ID NO: 2081 - RNA, 100 nt, synthetic construct
  source 1..100: mol_type = other RNA
  modified_base order(1..3,29..40,69..100): mod_base = OTHER; note = 2prime O-methyl nucleosides
  modified_base 1..3: mod_base = OTHER; note = phosphorothioate modification
  modified_base 98..100: mod_base = OTHER; note = phosphorothioate modification
nnnnnnnnnnnnnnnnnnnngttttagagctagaaatagcaagttaaaataaggctagtccgttatcaacttgaaaaagtggcaccgagtcggtgctttt

SEQ ID NO: 2082 - DNA, 20 bp, synthetic construct
  source 1..20: mol_type = other DNA
ggccacggagcgagacatct

SEQ ID NO: 2083 - DNA, 20 bp, synthetic construct
  source 1..20: mol_type = other DNA
cgcagtgccaggttagagag

SEQ ID NO: 2084 - DNA, 20 bp, synthetic construct
  source 1..20: mol_type = other DNA
cggctctgcttcccttagac

SEQ ID NO: 2085 - DNA, 20 bp, synthetic construct
  source 1..20: mol_type = other DNA
gcgcccggtgtcccaagctg

SEQ ID NO: 2086 - DNA, 20 bp, synthetic construct
  source 1..20: mol_type = other DNA
tctcacccaggctgatagtt

SEQ ID NO: 2087 - DNA, 20 bp, synthetic construct
  source 1..20: mol_type = other DNA
gctggctggctggctgctaa

SEQ ID NO: 2088 - DNA, 20 bp, synthetic construct
  source 1..20: mol_type = other DNA
ggcttatgccaatatcggtg

SEQ ID NO: 2089 - RNA, 112 nt, synthetic construct
  source 1..112: mol_type = other RNA
ggccacggagcgagacatctgtttaagagctaagctggaaacagcatagcaagtttaaataaggctagtccgttatcaacttgaaaaagtggcaccgagtcggtgctttttt

SEQ ID NO: 2090 - RNA, 112 nt, synthetic construct
  source 1..112: mol_type = other RNA
gcgccccagcttgggacaccgtttaagagctaagctggaaacagcatagcaagtttaaataaggctagtccgttatcaacttgaaaaagtggcaccgagtcggtgctttttt

SEQ ID NO: 2091 - RNA, 112 nt, synthetic construct
  source 1..112: mol_type = other RNA
cgcagtgccaggttagagaggtttaagagctaagctggaaacagcatagcaagtttaaataaggctagtccgttatcaacttgaaaaagtggcaccgagtcggtgctttttt

SEQ ID NO: 2092 - RNA, 112 nt, synthetic construct
  source 1..112: mol_type = other RNA
cggctctgcttcccttagacgtttaagagctaagctggaaacagcatagcaagtttaaataaggctagtccgttatcaacttgaaaaagtggcaccgagtcggtgctttttt

SEQ ID NO: 2093 - RNA, 112 nt, synthetic construct
  source 1..112: mol_type = other RNA
gcgcccggtgtcccaagctggtttaagagctaagctggaaacagcatagcaagtttaaataaggctagtccgttatcaacttgaaaaagtggcaccgagtcggtgctttttt

SEQ ID NO: 2094 - RNA, 112 nt, synthetic construct
  source 1..112: mol_type = other RNA
cacagttgccgattacaggtgtttaagagctaagctggaaacagcatagcaagtttaaataaggctagtccgttatcaacttgaaaaagtggcaccgagtcggtgctttttt

SEQ ID NO: 2095 - RNA, 112 nt, synthetic construct
  source 1..112: mol_type = other RNA
aggtggcgaaggcgctgtgggtttaagagctaagctggaaacagcatagcaagtttaaataaggctagtccgttatcaacttgaaaaagtggcaccgagtcggtgctttttt

SEQ ID NO: 2096 - RNA, 112 nt, synthetic construct
  source 1..112: mol_type = other RNA
gagcaaccgaggcaggcccagtttaagagctaagctggaaacagcatagcaagtttaaataaggctagtccgttatcaacttgaaaaagtggcaccgagtcggtgctttttt

SEQ ID NO: 2097 - RNA, 112 nt, synthetic construct
  source 1..112: mol_type = other RNA
tgctccgtcacagccgagttgtttaagagctaagctggaaacagcatagcaagtttaaataaggctagtccgttatcaacttgaaaaagtggcaccgagtcggtgctttttt

SEQ ID NO: 2098 - RNA, 112 nt, synthetic construct
  source 1..112: mol_type = other RNA
ccacagtcctccacttcctggtttaagagctaagctggaaacagcatagcaagtttaaataaggctagtccgttatcaacttgaaaaagtggcaccgagtcggtgctttttt

SEQ ID NO: 2099 - RNA, 112 nt, synthetic construct
  source 1..112: mol_type = other RNA
aggaagccctggaggtttgagtttaagagctaagctggaaacagcatagcaagtttaaataaggctagtccgttatcaacttgaaaaagtggcaccgagtcggtgctttttt

SEQ ID NO: 2100 - RNA, 100 nt, synthetic construct
  source 1..100: mol_type = other RNA
tctcacccaggctgatagttgttttagagctagaaatagcaagttaaaataaggctagtccgttatcaacttgaaaaagtggcaccgagtcggtgctttt

SEQ ID NO: 2101 - RNA, 100 nt, synthetic construct
  source 1..100: mol_type = other RNA
gctggctggctggctgctaagttttagagctagaaatagcaagttaaaataaggctagtccgttatcaacttgaaaaagtggcaccgagtcggtgctttt

SEQ ID NO: 2102 - RNA, 112 nt, synthetic construct
  source 1..112: mol_type = other RNA
attggcagctggcaccagtggtttaagagctaagctggaaacagcatagcaagtttaaataaggctagtccgttatcaacttgaaaaagtggcaccgagtcggtgctttttt

SEQ ID NO: 2103 - RNA, 112 nt, synthetic construct
  source 1..112: mol_type = other RNA
ccctgcaaggtggccccaaggtttaagagctaagctggaaacagcatagcaagtttaaataaggctagtccgttatcaacttgaaaaagtggcaccgagtcggtgctttttt

SEQ ID NO: 2104 - RNA, 112 nt, synthetic construct
  source 1..112: mol_type = other RNA
tagcttggcgggctcccaacgtttaagagctaagctggaaacagcatagcaagtttaaataaggctagtccgttatcaacttgaaaaagtggcaccgagtcggtgctttttt

SEQ ID NO: 2105 - RNA, 112 nt, synthetic construct
  source 1..112: mol_type = other RNA
gcgggctcccaactggtgacgtttaagagctaagctggaaacagcatagcaagtttaaataaggctagtccgttatcaacttgaaaaagtggcaccgagtcggtgctttttt

SEQ ID NO: 2106 - RNA, 102 nt, synthetic construct
  source 1..102: mol_type = other RNA
ggcttatgccaatatcggtggtttaagagctagaaatagcaagtttaaataaggctagtccgttatcaacttgaaaaagtggcaccgagtcggtgctttttt

SEQ ID NO: 2107 - RNA, 100 nt, synthetic construct
  source 1..100: mol_type = other RNA
ccggctgggccaggaccttggttttagagctagaaatagcaagttaaaataaggctagtccgttatcaacttgaaaaagtggcaccgagtcggtgctttt

SEQ ID NO: 2108 - RNA, 100 nt, synthetic construct
  source 1..100: mol_type = other RNA
gcagtgaccaatgacagagcgttttagagctagaaatagcaagttaaaataaggctagtccgttatcaacttgaaaaagtggcaccgagtcggtgctttt

SEQ ID NO: 2109 - RNA, 100 nt, synthetic construct
  source 1..100: mol_type = other RNA
gtcagcgtgtgtacgcccgcgttttagagctagaaatagcaagttaaaataaggctagtccgttatcaacttgaaaaagtggcaccgagtcggtgctttt

SEQ ID NO: 2110 - protein, 9 aa, synthetic construct
VMPPRTLLL

SEQ ID NO: 2111 - protein, 5 aa, synthetic construct
GGGGS

SEQ ID NO: 2112 - protein, 2155 aa, synthetic construct
MKRPAATKKAGQAKKKYNHDQEFDPPKVYPPVPAEKRKPIRVLSLFDGIATGLLVLKDLGIQVDRYIASEVCEDSITVGMVRHQGKIMYVGDVRSVTQKHIQEWGPFDLVIGGSPCNDLSIVNPARKGLYEGTGRLFFEFYRLLHDARPKEGDDRPFFWLFENVVAMGVSDKRDISRFLESNPVMIDAKEVSAAHRARYFWGNLPGMNRPLASTVNDKLELQECLEHGRIAKFSKVRTITTRSNSIKQGKDQHFPVFMNEKEDILWCTEMERVFGFPVHYTDVSNMSRLARQRLLGRSWSVPVIRHLFAPLKEYFACVSSGNSNANSRGPSFSSGLVPLSLRGSHSPLEMYKTVPVWKREPVRVLSLFGDIKKELTTLGFLENGSDPGRLKHLDDVTNTVRRDVEEWGPFDLVYGSTPPLGHACDHPPGWYLFQFHRVLQYARPRPGSPQAFFWMFVDNLVLTEDDRAVATRFLETDPVTIQDVCGRAVRNAVHVWSNIPAVKSRHSALFSQEESFLRAQDRQRAKPPARGPAKLVKNCFLPLREYFKYFSTEFTSSLGGPSSGAPPPSGGSPAGSPTSTEEGTSESATPESGPGTSTEPSEGSAPGSPAGSPTSTEEGTSTEPSEGSAPGTSTEPSELEDKKYSIGLAIGTNSVGWAVITDEYKVPSKKFKVLGNTDRHSIKKNLIGALLFDSGETAEATRLKRTARRRYTRRKNRICYLQEIFSNEMAKVDDSFFHRLEESFLVEEDKKHERHPIFGNIVDEVAYHEKYPTIYHLRKKLVDSTDKADLRLIYLALAHMIKFRGHFLIEGDLNPDNSDVDKLFIQLVQTYNQLFEENPINASGVDAKAILSARLSKSRRLENLIAQLPGEKKNGLFGNLIALSLGLTPNFKSNFDLAEDAKLQLSKDTYDDDLDNLLAQIGDQYADLFLAAKNLSDAILLSDILRVNTEITKAPLSASMIKRYDEHHQDLTLLKALVRQQLPEKYKEIFFDQSKNGYAGYIDGGASQEEFYKFIKPILEKMDGTEELLVKLNREDLLRKQRTFDNGSIPHQIHLGELHAILRRQEDFYPFLKDNREKIEKILTFRIPYYVGPLARGNSRFAWMTRKSEETITPWNFEEVVDKGASAQSFIERMTNFDKNLPNEKVLPKHSLLYEYFTVYNELTKVKYVTEGMRKPAFLSGEQKKAIVDLLFKTNRKVTVKQLKEDYFKKIECFDSVEISGVEDRFNASLGTYHDLLKIIKDKDFLDNEENEDILEDIVLTLTLFEDREMIEERLKTYAHLFDDKVMKQLKRRRYTGWGRLSRKLINGIRDKQSGKTILDFLKSDGFANRNFMQLIHDDSLTFKEDIQKAQVSGQGDSLHEHIANLAGSPAIKKGILQTVKVVDELVKVMGRHKPENIVIEMARENQTTQKGQKNSRERMKRIEEGIKELGSQILKEHPVENTQLQNEKLYLYYLQNGRDMYVDQELDINRLSDYDVDAIVPQSFLKDDSIDNKVLTRSDKNRGKSDNVPSEEVVKKMKNYWRQLLNAKLITQRKFDNLTKAERGGLSELDKAGFIKRQLVETRQITKHVAQILDSRMNTKYDENDKLIREVKVITLKSKLVSDFRKDFQFYKVREINNYHHAHDAYLNAVVGTALIKKYPKLESEFVYGDYKVYDVRKMIAKSEQEIGKATAKYFFYSNIMNFFKTEITLANGEIRKRPLIETNGETGEIVWDKGRDFATVRKVLSMPQVNIVKKTEVQTGGFSKESILPKRNSDKLIARKKDWDPKKYGGFDSPTVAYSVLVVAKVEKGKSKKLKSVKELLGITIMERSSFEKNPIDFLEAKGYKEVKKDLIIKLPKYSLFELENGRKRMLASAGELQKGNELALPSKYVNFLYLASHYEKLKGSPEDNEQKQLFVEQHKHYLDEIIEQISEFSKRVILADANLDKVLSAYNKHRDKPIREQAENIIHLFTLTNLGAPAAFKYFDTTIDRKRYTSTKEVLDATLIHQSITGLYETRIDLSQLGGDSPKKKRKVGVDGSSGSETPGTSESATPESTGMNNSQGRVTFEDVTVNFTQGEWQRLNPEQRNLYRDVMLENYSNLVSVGQGETTKPDVILRLEQGKEPWLEEEEVLGSGRAEKNGDIGGQIWKPKDVKESLSAKRPAATKKAGQAKKK

SEQ ID NO: 2113 - DNA, 9225 bp, synthetic construct
  source 1..9225: mol_type = other DNA
aggggcgctcgagcaggttcagaaggagatcaaaaacccccaaggatcaaacatgaagagacctgctgccaccaagaaggccggccaggccaagaaaaagtacaatcacgatcaggagttcgacccccctaaggtgtacccaccagtgcctgcagagaagaggaagccaatccgggtgctgagcctgtttgatggcatcgccaccggcctgctggtgctgaaggatctgggcatccaggtggaccggtacatcgcctccgaggtgtgcgaggattctatcaccgtgggcatggtgcgccaccagggcaagatcatgtatgtgggcgacgtgcggtccgtgacacagaagcacatccaggagtggggcccattcgatctggtgatcggcggcagcccctgtaatgacctgtccatcgtgaaccctgcaaggaagggactgtacgagggaaccggccggctgttctttgagttttatagactgctgcacgacgccaggcctaaggagggcgacgatagaccattcttttggctgttcgagaatgtggtggctatgggcgtgagcgataagagggacatctccaggtttctggagtctaaccccgtgatgatcgatgcaaaggaggtgtccgccgcacacagagccaggtatttctggggcaatctgccaggaatgaacaggccactggcaagcaccgtgaatgacaagctggagctgcaggagtgcctggagcacggaaggatcgccaagttttccaaggtgcgcacaatcaccacacggagcaattccatcaagcagggcaaggatcagcacttccccgtgttcatgaacgagaaggaggacatcctgtggtgtaccgagatggagagagtgttcggctttccagtgcactacacagacgtgtctaacatgagcaggctggcaaggcagcggctgctgggcagatcttggagcgtgcccgtgatcaggcacctgttcgcccctctgaaggagtattttgcctgcgtgagcagcggcaactccaatgccaacagccggggcccctctttcagctccggattggtgcctctgagcctgaggggctcccacagtccccttgagatgtataaaactgtgcctgtgtggaagagagagccagtgcgggtgctgtccctttttggtgacatcaagaaagagctgacgactttgggctttctggaaaacggctctgacccgggccgactgaaacatttggacgatgtcaccaatacggtgaggagggacgtggaagaatggggcccgttcgacctcgtgtacggctccacgccgcccctcggccacgcctgtgaccatcctcccgggtggtacctgttccagttccaccgtgtgcttcagtacgcgaggcccaggccgggcagcccgcaggccttcttctggatgtttgtggacaacctggtgctgaccgaggatgaccgggctgtagccactcgcttcctggagactgacccggtgaccatccaggacgtctgtggcagagctgtccggaacgccgtgcacgtgtggagcaacatcccggccgtgaaaagcaggcactcggccctgttttcccaggaggaatcattcctgcgggctcaggacaggcagagagcaaagccccccgcccgggggccagccaagctggtgaagaattgttttctccccctgagagaatatttcaagtatttttcaacagaattcacttcctctttgggaggaccctcctctggcgccccaccacctagcggcggctcccctgccggctctccaaccagcacagaggagggcaccagcgagtccgccacaccagagtctggacctggcaccagcacagagccatccgagggctctgccccaggctctcctgcaggcagccctacctccaccgaagagggcaccagcacagagccttctgagggcagcgccccaggcacctctacagagccaagcgagctcgaggacaagaagtacagcatcggcctggccatcggcaccaactctgtgggctgggccgtgatcaccgacgagtacaaggtgcccagcaagaaattcaaggtgctgggcaacaccgaccggcacagcatcaagaagaacctgatcggagccctgctgttcgacagcggcgaaacagccgaggccacccggctgaagagaaccgccagaagaagatacaccagacggaagaaccggatctgctatctgcaagagatcttcagcaacgagatggccaaggtggacgacagcttcttccacagactggaagagtccttcctggtggaagaggataagaagcacgagcggcaccccatcttcggcaacatcgtggacgaggtggcctaccacgagaagtaccccaccatctaccacctgagaaagaaactggtggacagcaccgacaaggccgacctgcggctgatctatctggccctggcccacatgatcaagttccggggccacttcctgatcgagggcgacctgaaccccgacaacagcgacgtggacaagctgttcatccagctggtgcagacctacaaccagctgttcgaggaaaaccccatcaacgccagcggcgtggacgccaaggccatcctgtctgccagactgagcaagagcagacggctggaaaatctgatcgcccagctgcccggcgagaagaagaatggcctgttcggcaacctgattgccctgagcctgggcctgacccccaacttcaagagcaacttcgacctggccgaggatgccaaactgcagctgagcaaggacacctacgacgacgacctggacaacctgctggcccagatcggcgaccagtacgccgacctgtttctggccgccaagaacctgtccgacgccatcctgctgagcgacatcctgagagtgaacaccgagatcaccaaggcccccctgagcgcctctatgatcaagagatacgacgagcaccaccaggacctgaccctgctgaaagctctcgtgcggcagcagctgcctgagaagtacaaagagattttcttcgaccagagcaagaacggctacgccggctacattgacggcggagccagccaggaagagttctacaagttcatcaagcccatcctggaaaagatggacggcaccgaggaactgctcgtgaagctgaacagagaggacctgctgcggaagcagcggaccttcgacaacggcagcatcccccaccagatccacctgggagagctgcacgccattctgcggcggcaggaagatttttacccattcctgaaggacaaccgggaaaagatcgagaagatcctgaccttccgcatcccctactacgtgggccctctggccaggggaaacagcagattcgcctggatgaccagaaagagcgaggaaaccatcaccccctggaacttcgaggaagtggtggacaagggcgcttccgcccagagcttcatcgagcggatgaccaacttcgataagaacctgcccaacgagaaggtgctgcccaagcacagcctgctgtacgagtacttcaccgtgtataacgagctgaccaaagtgaaatacgtgaccgagggaatgagaaagcccgccttcctgagcggcgagcagaaaaaggccatcgtggacctgctgttcaagaccaaccggaaagtgaccgtgaagcagctgaaagaggactacttcaagaaaatcgagtgcttcgactccgtggaaatctccggcgtggaagatcggttcaacgcctccctgggcacataccacgatctgctgaaaattatcaaggacaaggacttcctggacaatgaggaaaacgaggacattctggaagatatcgtgctgaccctgacactgtttgaggacagagagatgatcgaggaacggctgaaaacctatgcccacctgttcgacgacaaagtgatgaagcagctgaagcggcggagatacaccggctggggcaggctgagccggaagctgatcaacggcatccgggacaagcagtccggcaagacaatcctggatttcctgaagtccgacggcttcgccaacagaaacttcatgcagctgatccacgacgacagcctgacctttaaagaggacatccagaaagcccaggtgtccggccagggcgatagcctgcacgagcacattgccaatctggccggcagccccgccattaagaagggcatcctgcagacagtgaaggtggtggacgagctcgtgaaagtgatgggccggcacaagcccgagaacatcgtgatcgaaatggccagagagaaccagaccacccagaagggacagaagaacagccgcgagagaatgaagcggatcgaagagggcatcaaagagctgggcagccagatcctgaaagaacaccccgtggaaaacacccagctgcagaacgagaagctgtacctgtactacctgcagaatgggcgggatatgtacgtggaccaggaactggacatcaaccggctgtccgactacgatgtggacgccatcgtgcctcagagctttctgaaggacgactccatcgacaacaaggtgctgaccagaagcgacaagaaccggggcaagagcgacaacgtgccctccgaagaggtcgtgaagaagatgaagaactactggcggcagctgctgaacgccaagctgattacccagagaaagttcgacaatctgaccaaggccgagagaggcggcctgagcgaactggataaggccggcttcatcaagagacagctggtggaaacccggcagatcacaaagcacgtggcacagatcctggactcccggatgaacactaagtacgacgagaatgacaagctgatccgggaagtgaaagtgatcaccctgaagtccaagctggtgtccgatttccggaaggatttccagttttacaaagtgcgcgagatcaacaactaccaccacgcccacgacgcctacctgaacgccgtcgtgggaaccgccctgatcaaaaagtaccctaagctggaaagcgagttcgtgtacggcgactacaaggtgtacgacgtgcggaagatgatcgccaagagcgagcaggaaatcggcaaggctaccgccaagtacttcttctacagcaacatcatgaactttttcaagaccgagattaccctggccaacggcgagatccggaagcggcctctgatcgagacaaacggcgaaaccggggagatcgtgtgggataagggccgggattttgccaccgtgcggaaagtgctgagcatgccccaagtgaatatcgtgaaaaagaccgaggtgcagacaggcggcttcagcaaagagtctatcctgcccaagaggaacagcgataagctgatcgccagaaagaaggactgggaccctaagaagtacggcggcttcgacagccccaccgtggcctattctgtgctggtggtggccaaagtggaaaagggcaagtccaagaaactgaagagtgtgaaagagctgctggggatcaccatcatggaaagaagcagcttcgagaagaatcccatcgactttctggaagccaagggctacaaagaagtgaaaaaggacctgatcatcaagctgcctaagtactccctgttcgagctggaaaacggccggaagagaatgctggcctctgccggcgaactgcagaagggaaacgaactggccctgccctccaaatatgtgaacttcctgtacctggccagccactatgagaagctgaagggctcccccgaggataatgagcagaaacagctgtttgtggaacagcacaagcactacctggacgagatcatcgagcagatcagcgagttctccaagagagtgatcctggccgacgctaatctggacaaagtgctgtccgcctacaacaagcaccgggataagcccatcagagagcaggccgagaatatcatccacctgtttaccctgaccaatctgggagcccctgccgccttcaagtactttgacaccaccatcgaccggaagaggtacaccagcaccaaagaggtgctggacgccaccctgatccaccagagcatcaccggcctgtacgagacacggatcgacctgtctcagctgggaggcgacagccccaagaagaagagaaaggtgggagtcgacggatccagcggctccgagaccccaggcacatctgagagcgccacccctgagtccaccggtatgaacaattcacaggggagagtgacattcgaagacgtgaccgtgaacttcacccagggagaatggcagcgcttgaacccagaacaaaggaacctctatcgggacgtgatgctggaaaactactcaaatttggtgagcgttgggcagggtgagaccactaagcctgacgtgatcctgagattggaacagggcaaggagccttggctcgaggaagaggaagtcctgggctcagggagggccgagaaaaacggtgatataggaggccagatatggaagcctaaggacgtcaaggagagcctgagcgctaaacgtccggcagcaaccaaaaaagcaggtcaggccaagaaaaaatgaggatcctgagtctagaaaagatatatataggattgaagatctctcagttaagtctacaaaaaaaaaaaaaaaaaaaaaaaaaaaaaaaaaaaaaaaaaaaaaaaaaaaaaaaaaaaaaaaaaaaaaaaaaaaaaaaaaaaaaaaaaaaaaaaaaaaaaaaaaaaaaaaaaaaaaaaaagaagagcgaattcactggccgtcgttttacaacgtcgtgactgggaaaaccctggcgttacccaacttaatcgccttgcagcacatccccctttcgccagctggcgtaatagcgaagaggcccgcaccgatcgcccttcccaacagttgcgcagcctgaatggcgaatggcgcctgatgcggtattttctccttacgcatctgtgcggtatttcacaccgcatatggtgcactctcagtacaatctgctctgatgccgcatagttaagccagccccgacacccgccaacacccgctgacgcgccctgacgggcttgtctgctcccggcatccgcttacagacaagctgtgaccgtctccgggagctgcatgtgtcagaggttttcaccgtcatcaccgaaacgcgcgatgcagctctggcccgtgtctcaaaatctctgatgttacattgcacaagataaaaatatatcatcatgaacaataaaactgtctgcttacataaacagtaatacaaggggtgttatgagccatattcaacgggaaacgtcgaggccgcgattaaattccaacatggatgctgatttatatgggtataaatgggctcgcgataatgtcgggcaatcaggtgcgacaatctatcgcttgtatgggaagcccgatgcgccagagttgtttctgaaacatggcaaaggtagcgttgccaatgatgttacagatgagatggtcagactaaactggctgacggaatttatgcctcttccgaccatcaagcattttatccgtactcctgatgatgcatggttactcaccactgcgatccccggaaaaacagcattccaggtattagaagaatatcctgattcaggtgaaaatattgttgatgcgctggcagtgttcctgcgccggttgcattcgattcctgtttgtaattgtccttttaacagcgatcgcgtatttcgtctcgctcaggcgcaatcacgaatgaataacggtttggttgatgcgagtgattttgatgacgagcgtaatggctggcctgttgaacaagtctggaaagaaatgcataaacttttgccattctcaccggattcagtcgtcactcatggtgatttctcacttgataaccttatttttgacgaggggaaattaataggttgtattgatgttggacgagtcggaatcgcagaccgataccaggatcttgccatcctatggaactgcctcggtgagttttctccttcattacagaaacggctttttcaaaaatatggtattgataatcctgatatgaataaattgcagtttcatttgatgctcgatgagtttttctaatcagaattggttaattggttgtaacattattcagattgggcttgatttaaaacttcatttttaatttaaaaggatctaggtgaagatcctttttgataatctcatgaccaaaatcccttaacgtgagttttcgttccactgagcgtcagaccccgtagaaaagatcaaaggatcttcttgagatcctttttttctgcgcgtaatctgctgcttgcaaacaaaaaaaccaccgctaccagcggtggtttgtttgccggatcaagagctaccaactctttttccgaaggtaactggcttcagcagagcgcagataccaaatactgttcttctagtgtagccgtagttaggccaccacttcaagaactctgtagcaccgcctacatacctcgctctgctaatcctgttaccagtggctgctgccagtggcgataagtcgtgtcttaccgggttggactcaagacgatagttaccggataaggcgcagcggtcgggctgaacggggggttcgtgcacacagcccagcttggagcgaacgacctacaccgaactgagatacctacagcgtgagctatgagaaagcgccacgcttcccgaagggagaaaggcggacaggtatccggtaagcggcagggtcggaacaggagagcgcacgagggagcttccagggggaaacgcctggtatctttatagtcctgtcgggtttcgccacctctgacttgagcgtcgatttttgtgatgctcgtcaggggggcggagcctatggaaaaacgccagcaacgcggcctttttacggttcctggccttttgctggccttttgctcacatgttctttcctgcgttatcccctgattctgtggataaccgtattaccgcctttgagtgagctgataccgctcgccgcagccgaacgaccgagcgcagcgagtcagtgagcgaggaagcggcccaatacgcaaaccgcctctccccgcgcgttggccgattcattaatgcagctggcacgacaggtttcccgactggaaagcgggcagtgagcgcaacgcaattaatgtgagttagctcactcattaggcaccccaggctttacactttatgcttccggctcgtatgttgtgtggaattgtgagcggataacaatttcacacaggaaacagctatgaccatgattacgccaagctttaatacgactcactata

SEQ ID NO: 2114 - protein, 2156 aa, synthetic construct
MKRPAATKKAGQAKKKYNHDQEFDPPKVYPPVPAEKRKPIRVLSLFDGIATGLLVLKDLGIQVDRYIASEVCEDSITVGMVRHQGKIMYVGDVRSVTQKHIQEWGPFDLVIGGSPCNDLSIVNPARKGLYEGTGRLFFEFYRLLHDARPKEGDDRPFFWLFENVVAMGVSDKRDISRFLESNPVMIDAKEVSAAHRARYFWGNLPGMNRPLASTVNDKLELQECLEHGRIAKFSKVRTITTRSNSIKQGKDQHFPVFMNEKEDILWCTEMERVFGFPVHYTDVSNMSRLARQRLLGRSWSVPVIRHLFAPLKEYFACVSSGNSNANSRGPSFSSGLVPLSLRGSHSPMEIYKTVSAWKRQPVRVLSLFGNIDKELKSLGFLEIGSDSEGGTLKYVEDVTNVVRRDVEKWGPFDLVYGSTNPLGNSCDRCPGWYMFQFHRILQYARPRQDSQKPFFWIFMDNLLLTEDDQVTTVRFLQTEAVTLQDVRGRVLQNAVRVWSNIPGLKSKHSVLTPKEEQSLQAQVRTRSKLPTQVNPLVKTCLLPLREYFKCFSQNSLPLGGPSSGAPPPSGGSPAGSPTSTEEGTSESATPESGPGTSTEPSEGSAPGSPAGSPTSTEEGTSTEPSEGSAPGTSTEPSELEDKKYSIGLAIGTNSVGWAVITDEYKVPSKKFKVLGNTDRHSIKKNLIGALLFDSGETAEATRLKRTARRRYTRRKNRICYLQEIFSNEMAKVDDSFFHRLEESFLVEEDKKHERHPIFGNIVDEVAYHEKYPTIYHLRKKLVDSTDKADLRLIYLALAHMIKFRGHFLIEGDLNPDNSDVDKLFIQLVQTYNQLFEENPINASGVDAKAILSARLSKSRRLENLIAQLPGEKKNGLFGNLIALSLGLTPNFKSNFDLAEDAKLQLSKDTYDDDLDNLLAQIGDQYADLFLAAKNLSDAILLSDILRVNTEITKAPLSASMIKRYDEHHQDLTLLKALVRQQLPEKYKEIFFDQSKNGYAGYIDGGASQEEFYKFIKPILEKMDGTEELLVKLNREDLLRKQRTFDNGSIPHQIHLGELHAILRRQEDFYPFLKDNREKIEKILTFRIPYYVGPLARGNSRFAWMTRKSEETITPWNFEEVVDKGASAQSFIERMTNFDKNLPNEKVLPKHSLLYEYFTVYNELTKVKYVTEGMRKPAFLSGEQKKAIVDLLFKTNRKVTVKQLKEDYFKKIECFDSVEISGVEDRFNASLGTYHDLLKIIKDKDFLDNEENEDILEDIVLTLTLFEDREMIEERLKTYAHLFDDKVMKQLKRRRYTGWGRLSRKLINGIRDKQSGKTILDFLKSDGFANRNFMQLIHDDSLTFKEDIQKAQVSGQGDSLHEHIANLAGSPAIKKGILQTVKVVDELVKVMGRHKPENIVIEMARENQTTQKGQKNSRERMKRIEEGIKELGSQILKEHPVENTQLQNEKLYLYYLQNGRDMYVDQELDINRLSDYDVDAIVPQSFLKDDSIDNKVLTRSDKNRGKSDNVPSEEVVKKMKNYWRQLLNAKLITQRKFDNLTKAERGGLSELDKAGFIKRQLVETRQITKHVAQILDSRMNTKYDENDKLIREVKVITLKSKLVSDFRKDFQFYKVREINNYHHAHDAYLNAVVGTALIKKYPKLESEFVYGDYKVYDVRKMIAKSEQEIGKATAKYFFYSNIMNFFKTEITLANGEIRKRPLIETNGETGEIVWDKGRDFATVRKVLSMPQVNIVKKTEVQTGGFSKESILPKRNSDKLIARKKDWDPKKYGGFDSPTVAYSVLVVAKVEKGKSKKLKSVKELLGITIMERSSFEKNPIDFLEAKGYKEVKKDLIIKLPKYSLFELENGRKRMLASAGELQKGNELALPSKYVNFLYLASHYEKLKGSPEDNEQKQLFVEQHKHYLDEIIEQISEFSKRVILADANLDKVLSAYNKHRDKPIREQAENIIHLFTLTNLGAPAAFKYFDTTIDRKRYTSTKEVLDATLIHQSITGLYETRIDLSQLGGDSPKKKRKVGVDGSSGSETPGTSESATPESTGMNNSQGRVTFEDVTVNFTQGEWQRLNPEQRNLYRDVMLENYSNLVSVGQGETTKPDVILRLEQGKEPWLEEEEVLGSGRAEKNGDIGGQIWKPKDVKESLSAAKRPAATKKAGQAKKK

SEQ ID NO: 2115 - DNA, 9342 bp, synthetic construct
  source 1..9342: mol_type = other DNA
agaaactagcgtaaattcaaatataggtcaggcttcaacgtcaacaaatatgatgaagagacctgctgccaccaagaaggccggccaggccaagaaaaagtacaatcacgatcaggagttcgacccccctaaggtgtacccaccagtgcctgcagagaagaggaagccaatccgggtgctgagcctgtttgatggcatcgccaccggcctgctggtgctgaaggatctgggcatccaggtggaccggtacatcgcctccgaggtgtgcgaggattctatcaccgtgggcatggtgcgccaccagggcaagatcatgtatgtgggcgacgtgcggtccgtgacacagaagcacatccaggagtggggcccattcgatctggtgatcggcggcagcccctgtaatgacctgtccatcgtgaaccctgcaaggaagggactgtacgagggaaccggccggctgttctttgagttttatagactgctgcacgacgccaggcctaaggagggcgacgatagaccattcttttggctgttcgagaatgtggtggctatgggcgtgagcgataagagggacatctccaggtttctggagtctaaccccgtgatgatcgatgcaaaggaggtgtccgccgcacacagagccaggtatttctggggcaatctgccaggaatgaacaggccactggcaagcaccgtgaatgacaagctggagctgcaggagtgcctggagcacggaaggatcgccaagttttccaaggtgcgcacaatcaccacacggagcaattccatcaagcagggcaaggatcagcacttccccgtgttcatgaacgagaaggaggacatcctgtggtgtaccgagatggagagagtgttcggctttccagtgcactacacagacgtgtctaacatgagcaggctggcaaggcagcggctgctgggcagatcttggagcgtgcccgtgatcaggcacctgttcgcccctctgaaggagtattttgcctgcgtgagcagcggcaactccaatgccaacagccggggcccctctttcagctccggattggtgcctctgagcctgaggggctcccacagccctatggagatatacaagacagtgtctgcatggaagagacagccagtgagggtgctgagcctttttgggaatattgataaagaactaaagagtttgggctttttggaaatcggttctgattctgagggaggaacactgaagtacgtggaagatgtcacgaatgtcgtgaggagagacgtggagaaatggggcccctttgacctggtgtatggctcgacgaatcccctaggcaactcttgtgaccgctgtcctggctggtacatgttccaattccaccggatcctgcagtatgcgcggcctcgccaagacagtcagaagcccttcttctggatatttatggacaatctgctgctgactgaggatgatcaagtgacaactgtccgcttccttcagacagaggctgtgaccctccaggatgtccgtggcagagtcctccagaatgctgtgagggtatggagcaacattccaggactgaagagtaagcactcagtcctgacgccaaaggaagaacagtctctgcaagcccaagtcagaaccagaagcaagctgcccacccaggttaaccccctggtgaagacctgccttctccccctgagagagtacttcaagtgtttttctcagaattcacttcctcttggaggaccctcctctggcgccccaccacctagcggcggctcccctgccggctctccaaccagcacagaggagggcaccagcgagtccgccacaccagagtctggacctggcaccagcacagagccatccgagggctctgccccaggctctcctgcaggcagccctacctccaccgaagagggcaccagcacagagccttctgagggcagcgccccaggcacctctacagagccaagcgagctcgaggacaagaagtacagcatcggcctggccatcggcaccaactctgtgggctgggccgtgatcaccgacgagtacaaggtgcccagcaagaaattcaaggtgctgggcaacaccgaccggcacagcatcaagaagaacctgatcggagccctgctgttcgacagcggcgaaacagccgaggccacccggctgaagagaaccgccagaagaagatacaccagacggaagaaccggatctgctatctgcaagagatcttcagcaacgagatggccaaggtggacgacagcttcttccacagactggaagagtccttcctggtggaagaggataagaagcacgagcggcaccccatcttcggcaacatcgtggacgaggtggcctaccacgagaagtaccccaccatctaccacctgagaaagaaactggtggacagcaccgacaaggccgacctgcggctgatctatctggccctggcccacatgatcaagttccggggccacttcctgatcgagggcgacctgaaccccgacaacagcgacgtggacaagctgttcatccagctggtgcagacctacaaccagctgttcgaggaaaaccccatcaacgccagcggcgtggacgccaaggccatcctgtctgccagactgagcaagagcagacggctggaaaatctgatcgcccagctgcccggcgagaagaagaatggcctgttcggcaacctgattgccctgagcctgggcctgacccccaacttcaagagcaacttcgacctggccgaggatgccaaactgcagctgagcaaggacacctacgacgacgacctggacaacctgctggcccagatcggcgaccagtacgccgacctgtttctggccgccaagaacctgtccgacgccatcctgctgagcgacatcctgagagtgaacaccgagatcaccaaggcccccctgagcgcctctatgatcaagagatacgacgagcaccaccaggacctgaccctgctgaaagctctcgtgcggcagcagctgcctgagaagtacaaagagattttcttcgaccagagcaagaacggctacgccggctacattgacggcggagccagccaggaagagttctacaagttcatcaagcccatcctggaaaagatggacggcaccgaggaactgctcgtgaagctgaacagagaggacctgctgcggaagcagcggaccttcgacaacggcagcatcccccaccagatccacctgggagagctgcacgccattctgcggcggcaggaagatttttacccattcctgaaggacaaccgggaaaagatcgagaagatcctgaccttccgcatcccctactacgtgggccctctggccaggggaaacagcagattcgcctggatgaccagaaagagcgaggaaaccatcaccccctggaacttcgaggaagtggtggacaagggcgcttccgcccagagcttcatcgagcggatgaccaacttcgataagaacctgcccaacgagaaggtgctgcccaagcacagcctgctgtacgagtacttcaccgtgtataacgagctgaccaaagtgaaatacgtgaccgagggaatgagaaagcccgccttcctgagcggcgagcagaaaaaggccatcgtggacctgctgttcaagaccaaccggaaagtgaccgtgaagcagctgaaagaggactacttcaagaaaatcgagtgcttcgactccgtggaaatctccggcgtggaagatcggttcaacgcctccctgggcacataccacgatctgctgaaaattatcaaggacaaggacttcctggacaatgaggaaaacgaggacattctggaagatatcgtgctgaccctgacactgtttgaggacagagagatgatcgaggaacggctgaaaacctatgcccacctgttcgacgacaaagtgatgaagcagctgaagcggcggagatacaccggctggggcaggctgagccggaagctgatcaacggcatccgggacaagcagtccggcaagacaatcctggatttcctgaagtccgacggcttcgccaacagaaacttcatgcagctgatccacgacgacagcctgacctttaaagaggacatccagaaagcccaggtgtccggccagggcgatagcctgcacgagcacattgccaatctggccggcagccccgccattaagaagggcatcctgcagacagtgaaggtggtggacgagctcgtgaaagtgatgggccggcacaagcccgagaacatcgtgatcgaaatggccagagagaaccagaccacccagaagggacagaagaacagccgcgagagaatgaagcggatcgaagagggcatcaaagagctgggcagccagatcctgaaagaacaccccgtggaaaacacccagctgcagaacgagaagctgtacctgtactacctgcagaatgggcgggatatgtacgtggaccaggaactggacatcaaccggctgtccgactacgatgtggacgccatcgtgcctcagagctttctgaaggacgactccatcgacaacaaggtgctgaccagaagcgacaagaaccggggcaagagcgacaacgtgccctccgaagaggtcgtgaagaagatgaagaactactggcggcagctgctgaacgccaagctgattacccagagaaagttcgacaatctgaccaaggccgagagaggcggcctgagcgaactggataaggccggcttcatcaagagacagctggtggaaacccggcagatcacaaagcacgtggcacagatcctggactcccggatgaacactaagtacgacgagaatgacaagctgatccgggaagtgaaagtgatcaccctgaagtccaagctggtgtccgatttccggaaggatttccagttttacaaagtgcgcgagatcaacaactaccaccacgcccacgacgcctacctgaacgccgtcgtgggaaccgccctgatcaaaaagtaccctaagctggaaagcgagttcgtgtacggcgactacaaggtgtacgacgtgcggaagatgatcgccaagagcgagcaggaaatcggcaaggctaccgccaagtacttcttctacagcaacatcatgaactttttcaagaccgagattaccctggccaacggcgagatccggaagcggcctctgatcgagacaaacggcgaaaccggggagatcgtgtgggataagggccgggattttgccaccgtgcggaaagtgctgagcatgccccaagtgaatatcgtgaaaaagaccgaggtgcagacaggcggcttcagcaaagagtctatcctgcccaagaggaacagcgataagctgatcgccagaaagaaggactgggaccctaagaagtacggcggcttcgacagccccaccgtggcctattctgtgctggtggtggccaaagtggaaaagggcaagtccaagaaactgaagagtgtgaaagagctgctggggatcaccatcatggaaagaagcagcttcgagaagaatcccatcgactttctggaagccaagggctacaaagaagtgaaaaaggacctgatcatcaagctgcctaagtactccctgttcgagctggaaaacggccggaagagaatgctggcctctgccggcgaactgcagaagggaaacgaactggccctgccctccaaatatgtgaacttcctgtacctggccagccactatgagaagctgaagggctcccccgaggataatgagcagaaacagctgtttgtggaacagcacaagcactacctggacgagatcatcgagcagatcagcgagttctccaagagagtgatcctggccgacgctaatctggacaaagtgctgtccgcctacaacaagcaccgggataagcccatcagagagcaggccgagaatatcatccacctgtttaccctgaccaatctgggagcccctgccgccttcaagtactttgacaccaccatcgaccggaagaggtacaccagcaccaaagaggtgctggacgccaccctgatccaccagagcatcaccggcctgtacgagacacggatcgacctgtctcagctgggaggcgacagccccaagaagaagagaaaggtgggagtcgacggatccagcggctccgagaccccaggcacatctgagagcgccacccctgagtccaccggtatgaacaattcacaggggagagtgacattcgaagacgtgaccgtgaacttcacccagggagaatggcagcgcttgaacccagaacaaaggaacctctatcgggacgtgatgctggaaaactactcaaatttggtgagcgttgggcagggtgagaccactaagcctgacgtgatcctgagattggaacagggcaaggagccttggctcgaggaagaggaagtcctgggctcagggagggccgagaaaaacggtgatataggaggccagatatggaagcctaaggacgtcaaggagagcctgagcgctgctaaacgtccggcagcaaccaaaaaagcaggtcaggccaagaaaaaatgaggatcctgagtctagaaagagccttctgagcccagcgacttctgaagggccccttgcaaagtaatagggcttctgcctaagcctctccctccagccaataggcagctttcttaactatcctaacaagccttggaccaaatggaaataaagctttttgatgcagtgttaattaaaaaaaaaaaaaaaaaaaaaaaaaaaaaaaaaaaaaaaaaaaaaaaaaaaaaaaaaaaaaaaaaaaaaaaaaaaaaaaaaaaaaaaaaaaaaaaaaaaaaaaaaaaaaaaaaaaaaaaaagaagagcgaattcactggccgtcgttttacaacgtcgtgactgggaaaaccctggcgttacccaacttaatcgccttgcagcacatccccctttcgccagctggcgtaatagcgaagaggcccgcaccgatcgcccttcccaacagttgcgcagcctgaatggcgaatggcgcctgatgcggtattttctccttacgcatctgtgcggtatttcacaccgcatatggtgcactctcagtacaatctgctctgatgccgcatagttaagccagccccgacacccgccaacacccgctgacgcgccctgacgggcttgtctgctcccggcatccgcttacagacaagctgtgaccgtctccgggagctgcatgtgtcagaggttttcaccgtcatcaccgaaacgcgcgatgcagctctggcccgtgtctcaaaatctctgatgttacattgcacaagataaaaatatatcatcatgaacaataaaactgtctgcttacataaacagtaatacaaggggtgttatgagccatattcaacgggaaacgtcgaggccgcgattaaattccaacatggatgctgatttatatgggtataaatgggctcgcgataatgtcgggcaatcaggtgcgacaatctatcgcttgtatgggaagcccgatgcgccagagttgtttctgaaacatggcaaaggtagcgttgccaatgatgttacagatgagatggtcagactaaactggctgacggaatttatgcctcttccgaccatcaagcattttatccgtactcctgatgatgcatggttactcaccactgcgatccccggaaaaacagcattccaggtattagaagaatatcctgattcaggtgaaaatattgttgatgcgctggcagtgttcctgcgccggttgcattcgattcctgtttgtaattgtccttttaacagcgatcgcgtatttcgtctcgctcaggcgcaatcacgaatgaataacggtttggttgatgcgagtgattttgatgacgagcgtaatggctggcctgttgaacaagtctggaaagaaatgcataaacttttgccattctcaccggattcagtcgtcactcatggtgatttctcacttgataaccttatttttgacgaggggaaattaataggttgtattgatgttggacgagtcggaatcgcagaccgataccaggatcttgccatcctatggaactgcctcggtgagttttctccttcattacagaaacggctttttcaaaaatatggtattgataatcctgatatgaataaattgcagtttcatttgatgctcgatgagtttttctaatcagaattggttaattggttgtaacattattcagattgggcttgatttaaaacttcatttttaatttaaaaggatctaggtgaagatcctttttgataatctcatgaccaaaatcccttaacgtgagttttcgttccactgagcgtcagaccccgtagaaaagatcaaaggatcttcttgagatcctttttttctgcgcgtaatctgctgcttgcaaacaaaaaaaccaccgctaccagcggtggtttgtttgccggatcaagagctaccaactctttttccgaaggtaactggcttcagcagagcgcagataccaaatactgttcttctagtgtagccgtagttaggccaccacttcaagaactctgtagcaccgcctacatacctcgctctgctaatcctgttaccagtggctgctgccagtggcgataagtcgtgtcttaccgggttggactcaagacgatagttaccggataaggcgcagcggtcgggctgaacggggggttcgtgcacacagcccagcttggagcgaacgacctacaccgaactgagatacctacagcgtgagctatgagaaagcgccacgcttcccgaagggagaaaggcggacaggtatccggtaagcggcagggtcggaacaggagagcgcacgagggagcttccagggggaaacgcctggtatctttatagtcctgtcgggtttcgccacctctgacttgagcgtcgatttttgtgatgctcgtcaggggggcggagcctatggaaaaacgccagcaacgcggcctttttacggttcctggccttttgctggccttttgctcacatgttctttcctgcgttatcccctgattctgtggataaccgtattaccgcctttgagtgagctgataccgctcgccgcagccgaacgaccgagcgcagcgagtcagtgagcgaggaagcggcccaatacgcaaaccgcctctccccgcgcgttggccgattcattaatgcagctggcacgacaggtttcccgactggaaagcgggcagtgagcgcaacgcaattaatgtgagttagctcactcattaggcaccccaggctttacactttatgcttccggctcgtatgttgtgtggaattgtgagcggataacaatttcacacaggaaacagctatgaccatgattacgccaagctttaatacgactcactata

SEQ ID NO: 2116 - protein, 2155 aa, synthetic construct; identical to SEQ ID NO: 2112

SEQ ID NO: 2117 - DNA, 9235 bp, synthetic construct
  source 1..9235: mol_type = other DNA
aggggcgctcgagcaggttcagaaggagatcaaaaacccccaaggatcaaacatgaagagacctgctgccaccaagaaggccggccaggccaagaaaaagtacaatcacgatcaggagttcgacccccctaaggtgtacccaccagtgcctgcagagaagaggaagccaatccgggtgctgagcctgtttgatggcatcgccaccggcctgctggtgctgaaggatctgggcatccaggtggaccggtacatcgcctccgaggtgtgcgaggattctatcaccgtgggcatggtgcgccaccagggcaagatcatgtatgtgggcgacgtgcggtccgtgacacagaagcacatccaggagtggggcccattcgatctggtgatcggcggcagcccctgtaatgacctgtccatcgtgaaccctgcaaggaagggactgtacgagggaaccggccggctgttctttgagttttatagactgctgcacgacgccaggcctaaggagggcgacgatagaccattcttttggctgttcgagaatgtggtggctatgggcgtgagcgataagagggacatctccaggtttctggagtctaaccccgtgatgatcgatgcaaaggaggtgtccgccgcacacagagccaggtatttctggggcaatctgccaggaatgaacaggccactggcaagcaccgtgaatgacaagctggagctgcaggagtgcctggagcacggaaggatcgccaagttttccaaggtgcgcacaatcaccacacggagcaattccatcaagcagggcaaggatcagcacttccccgtgttcatgaacgagaaggaggacatcctgtggtgtaccgagatggagagagtgttcggctttccagtgcactacacagacgtgtctaacatgagcaggctggcaaggcagcggctgctgggcagatcttggagcgtgcccgtgatcaggcacctgttcgcccctctgaaggagtattttgcctgcgtgagcagcggcaactccaatgccaacagccggggcccctctttcagctccggattggtgcctctgagcctgaggggctcccacagtccccttgagatgtataaaactgtgcctgtgtggaagagagagccagtgcgggtgctgtccctttttggtgacatcaagaaagagctgacgactttgggctttctggaaaacggctctgacccgggccgactgaaacatttggacgatgtcaccaatacggtgaggagggacgtggaagaatggggcccgttcgacctcgtgtacggctccacgccgcccctcggccacgcctgtgaccatcctcccgggtggtacctgttccagttccaccgtgtgcttcagtacgcgaggcccaggccgggcagcccgcaggccttcttctggatgtttgtggacaacctggtgctgaccgaggatgaccgggctgtagccactcgcttcctggagactgacccggtgaccatccaggacgtctgtggcagagctgtccggaacgccgtgcacgtgtggagcaacatcccggccgtgaaaagcaggcactcggccctgttttcccaggaggaatcattcctgcgggctcaggacaggcagagagcaaagccccccgcccgggggccagccaagctggtgaagaattgttttctccccctgagagaatatttcaagtatttttcaacagaattcacttcctctttgggaggaccctcctctggcgccccaccacctagcggcggctcccctgccggctctccaaccagcacagaggagggcaccagcgagtccgccacaccagagtctggacctggcaccagcacagagccatccgagggctctgccccaggctctcctgcaggcagccctacctccaccgaagagggcaccagcacagagccttctgagggcagcgccccaggcacctctacagagccaagcgagctcgaggacaagaagtacagcatcggcctggccatcggcaccaactctgtgggctgggccgtgatcaccgacgagtacaaggtgcccagcaagaaattcaaggtgctgggcaacaccgaccggcacagcatcaagaagaacctgatcggagccctgctgttcgacagcggcgaaacagccgaggccacccggctgaagagaaccgccagaagaagatacaccagacggaagaaccggatctgctatctgcaagagatcttcagcaacgagatggccaaggtggacgacagcttcttccacagactggaagagtccttcctggtggaagaggataagaagcacgagcggcaccccatcttcggcaacatcgtggacgaggtggcctaccacgagaagtaccccaccatctaccacctgagaaagaaactggtggacagcaccgacaaggccgacctgcggctgatctatctggccctggcccacatgatcaagttccggggccacttcctgatcgagggcgacctgaaccccgacaacagcgacgtggacaagctgttcatccagctggtgcagacctacaaccagctgttcgaggaaaaccccatcaacgccagcggcgtggacgccaaggccatcctgtctgccagactgagcaagagcagacggctggaaaatctgatcgcccagctgcccggcgagaagaagaatggcctgttcggcaacctgattgccctgagcctgggcctgacccccaacttcaagagcaacttcgacctggccgaggatgccaaactgcagctgagcaaggacacctacgacgacgacctggacaacctgctggcccagatcggcgaccagtacgccgacctgtttctggccgccaagaacctgtccgacgccatcctgctgagcgacatcctgagagtgaacaccgagatcaccaaggcccccctgagcgcctctatgatcaagagatacgacgagcaccaccaggacctgaccctgctgaaagctctcgtgcggcagcagctgcctgagaagtacaaagagattttcttcgaccagagcaagaacggctacgccggctacattgacggcggagccagccaggaagagttctacaagttcatcaagcccatcctggaaaagatggacggcaccgaggaactgctcgtgaagctgaacagagaggacctgctgcggaagcagcggaccttcgacaacggcagcatcccccaccagatccacctgggagagctgcacgccattctgcggcggcaggaagatttttacccattcctgaaggacaaccgggaaaagatcgagaagatcctgaccttccgcatcccctactacgtgggccctctggccaggggaaacagcagattcgcctggatgaccagaaagagcgaggaaaccatcaccccctggaacttcgaggaagtggtggacaagggcgcttccgcccagagcttcatcgagcggatgaccaacttcgataagaacctgcccaacgagaaggtgctgcccaagcacagcctgctgtacgagtacttcaccgtgtataacgagctgaccaaagtgaaatacgtgaccgagggaatgagaaagcccgccttcctgagcggcgagcagaaaaaggccatcgtggacctgctgttcaagaccaaccggaaagtgaccgtgaagcagctgaaagaggactacttcaagaaaatcgagtgcttcgactccgtggaaatctccggcgtggaagatcggttcaacgcctccctgggcacataccacgatctgctgaaaattatcaaggacaaggacttcctggacaatgaggaaaacgaggacattctggaagatatcgtgctgaccctgacactgtttgaggacagagagatgatcgaggaacggctgaaaacctatgcccacctgttcgacgacaaagtgatgaagcagctgaagcggcggagatacaccggctggggcaggctgagccggaagctgatcaacggcatccgggacaagcagtccggcaagacaatcctggatttcctgaagtccgacggcttcgccaacagaaacttcatgcagctgatccacgacgacagcctgacctttaaagaggacatccagaaagcccaggtgtccggccagggcgatagcctgcacgagcacattgccaatctggccggcagccccgccattaagaagggcatcctgcagacagtgaaggtggtggacgagctcgtgaaagtgatgggccggcacaagcccgagaacatcgtgatcgaaatggccagagagaaccagaccacccagaagggacagaagaacagccgcgagagaatgaagcggatcgaagagggcatcaaagagctgggcagccagatcctgaaagaacaccccgtggaaaacacccagctgcagaacgagaagctgtacctgtactacctgcagaatgggcgggatatgtacgtggaccaggaactggacatcaaccggctgtccgactacgatgtggacgccatcgtgcctcagagctttctgaaggacgactccatcgacaacaaggtgctgaccagaagcgacaagaaccggggcaagagcgacaacgtgccctccgaagaggtcgtgaagaagatgaagaactactggcggcagctgctgaacgccaagctgattacccagagaaagttcgacaatctgaccaaggccgagagaggcggcctgagcgaactggataaggccggcttcatcaagagacagctggtggaaacccggcagatcacaaagcacgtggcacagatcctggactcccggatgaacactaagtacgacgagaatgacaagctgatccgggaagtgaaagtgatcaccctgaagtccaagctggtgtccgatttccggaaggatttccagttttacaaagtgcgcgagatcaacaactaccaccacgcccacgacgcctacctgaacgccgtcgtgggaaccgccctgatcaaaaagtaccctaagctggaaagcgagttcgtgtacggcgactacaaggtgtacgacgtgcggaagatgatcgccaagagcgagcaggaaatcggcaaggctaccgccaagtacttcttctacagcaacatcatgaactttttcaagaccgagattaccctggccaacggcgagatccggaagcggcctctgatcgagacaaacggcgaaaccggggagatcgtgtgggataagggccgggattttgccaccgtgcggaaagtgctgagcatgccccaagtgaatatcgtgaaaaagaccgaggtgcagacaggcggcttcagcaaagagtctatcctgcccaagaggaacagcgataagctgatcgccagaaagaaggactgggaccctaagaagtacggcggcttcgacagccccaccgtggcctattctgtgctggtggtggccaaagtggaaaagggcaagtccaagaaactgaagagtgtgaaagagctgctggggatcaccatcatggaaagaagcagcttcgagaagaatcccatcgactttctggaagccaagggctacaaagaagtgaaaaaggacctgatcatcaagctgcctaagtactccctgttcgagctggaaaacggccggaagagaatgctggcctctgccggcgaactgcagaagggaaacgaactggccctgccctccaaatatgtgaacttcctgtacctggccagccactatgagaagctgaagggctcccccgaggataatgagcagaaacagctgtttgtggaacagcacaagcactacctggacgagatcatcgagcagatcagcgagttctccaagagagtgatcctggccgacgctaatctggacaaagtgctgtccgcctacaacaagcaccgggataagcccatcagagagcaggccgagaatatcatccacctgtttaccctgaccaatctgggagcccctgccgccttcaagtactttgacaccaccatcgaccggaagaggtacaccagcaccaaagaggtgctggacgccaccctgatccaccagagcatcaccggcctgtacgagacacggatcgacctgtctcagctgggaggcgacagccccaagaagaagagaaaggtgggagtcgacggatccagcggctccgagaccccaggcacatctgagagcgccacccctgagtccaccggtatgaacaattcacaggggagagtgacattcgaagacgtgaccgtgaacttcacccagggagaatggcagcgcttgaacccagaacaaaggaacctctatcgggacgtgatgctggaaaactactcaaatttggtgagcgttgggcagggtgagaccactaagcctgacgtgatcctgagattggaacagggcaaggagccttggctcgaggaagaggaagtcctgggctcagggagggccgagaaaaacggtgatataggaggccagatatggaagcctaaggacgtcaaggagagcctgagcgctaaacgtccggcagcaaccaaaaaagcaggtcaggccaagaaaaaatgaggatcctgagtctagaaaagatatatataggattgaagatctctcagttaagtctacaaaaaaaaaaaaaaaaaaaaaaaaaaaaaaaaaaaaaaaaaaaaaaaaaaaaaaaaaaaaaaaaaaaaaaaaaaaaaaaaaaaaaaaaaaaaaaaaaaaaaaaaaaaaaaaaaaaaaaaaagaagagcctcctgcaggaagcttggcgtaatcatggtcatagctgtttcctgtgtgaaattgttatccgctcacaattccacacaacatacgagccggaagcataaagtgtaaagcctggggtgcctaatgagtgagctaactcacattaattgcgttgcgctcactgcccgctttccagtcgggaaacctgtcgtgccagctgcattaatgaatcggccaacgcgcggggagaggcggtttgcgtattgggccgcttcctcgctcactgactcgctgcgctcggtcgttcggctgcggcgagcggtatcagctcactcaaaggcggtaatacggttatccacagaatcaggggataacgcaggaaagaacatgtgagcaaaaggccagcaaaaggccaggaaccgtaaaaaggccgcgttgctggcgtttttccataggctccgcccccctgacgagcatcacaaaaatcgacgctcaagtcagaggtggcgaaacccgacaggactataaagataccaggcgtttccccctggaagctccctcgtgcgctctcctgttccgaccctgccgcttaccggatacctgtccgcctttctcccttcgggaagcgtggcgctttctcatagctcacgctgtaggtatctcagttcggtgtaggtcgttcgctccaagctgggctgtgtgcacgaaccccccgttcagcccgaccgctgcgccttatccggtaactatcgtcttgagtccaacccggtaagacacgacttatcgccactggcagcagccactggtaacaggattagcagagcgaggtatgtaggcggtgctacagagttcttgaagtggtggcctaactacggctacactagaagaacagtatttggtatctgcgctctgctgaagccagttaccttcggaaaaagagttggtagctcttgatccggcaaacaaaccaccgctggtagcggtggtttttttgtttgcaagcagcagattacgcgcagaaaaaaaggatctcaagaagatcctttgatcttttctacggggtctgacgctcagtggaacgaaaactcacgttaagggattttggtcatgagattatcaaaaaggatcttcacctagatccttttaaattaaaaatgaagttttaaatcaagcccaatctgaataatgttacaaccaattaaccaattctgattagaaaaactcatcgagcatcaaatgaaactgcaatttattcatatcaggattatcaataccatatttttgaaaaagccgtttctgtaatgaaggagaaaactcaccgaggcagttccataggatggcaagatcctggtatcggtctgcgattccgactcgtccaacatcaatacaacctattaatttcccctcgtcaaaaataaggttatcaagtgagaaatcaccatgagtgacgactgaatccggtgagaatggcaaaagtttatgcatttctttccagacttgttcaacaggccagccattacgctcgtcatcaaaatcactcgcatcaaccaaaccgttattcattcgtgattgcgcctgagcgagacgaaatacgcgatcgctgttaaaaggacaattacaaacaggaatcgaatgcaaccggcgcaggaacactgccagcgcatcaacaatattttcacctgaatcaggatattcttctaatacctggaatgctgtttttccggggatcgcagtggtgagtaaccatgcatcatcaggagtacggataaaatgcttgatggtcggaagaggcataaattccgtcagccagtttagtctgaccatctcatctgtaacatcattggcaacgctacctttgccatgtttcagaaacaactctggcgcatcgggcttcccatacaagcgatagattgtcgcacctgattgcccgacattatcgcgagcccatttatacccatataaatcagcatccatgttggaatttaatcgcggcctcgacgtttcccgttgaatatggctcataacaccccttgtattactgtttatgtaagcagacagttttattgttcatgatgatatatttttatcttgtgcaatgtaacatcagagattttgagacacgggccagagctgcatcgcgcgtttcggtgatgacggtgaaaacctctgacacatgcagctcccggagacggtcacagcttgtctgtaagcggatgccgggagcagacaagcccgtcagggcgcgtcagcgggtgttggcgggtgtcggggctggcttaactatgcggcatcagagcagattgtactgagagtgcaccatatgcggtgtgaaataccgcacagatgcgtaaggagaaaataccgcatcaggcgccattcgccattcaggctgcgcaactgttgggaagggcgatcggtgcgggcctcttcgctattacgccagctggcgaaagggggatgtgctgcaaggcgattaagttgggtaacgccagggttttcccagtcacgacgttgtaaaacgacggccagtgaattgtaatacgactcactata

SEQ ID NO: 2118 - protein, 2155 aa, synthetic construct; identical to SEQ ID NO: 2112

SEQ ID NO: 2119 - DNA, 9225 bp, synthetic construct
  source 1..9225: mol_type = other DNA
agaaactagcgtaaattcaaatataggtcaggcttcaacgtcaacaaatatgatgaagagacctgctgccaccaagaaggccggccaggccaagaaaaagtacaatcacgatcaggagttcgacccccctaaggtgtacccaccagtgcctgcagagaagaggaagccaatccgggtgctgagcctgtttgatggcatcgccaccggcctgctggtgctgaaggatctgggcatccaggtggaccggtacatcgcctccgaggtgtgcgaggattctatcaccgtgggcatggtgcgccaccagggcaagatcatgtatgtgggcgacgtgcggtccgtgacacagaagcacatccaggagtggggcccattcgatctggtgatcggcggcagcccctgtaatgacctgtccatcgtgaaccctgcaaggaagggactgtacgagggaaccggccggctgttctttgagttttatagactgctgcacgacgccaggcctaaggagggcgacgatagaccattcttttggctgttcgagaatgtggtggctatgggcgtgagcgataagagggacatctccaggtttctggagtctaaccccgtgatgatcgatgcaaaggaggtgtccgccgcacacagagccaggtatttctggggcaatctgccaggaatgaacaggccactggcaagcaccgtgaatgacaagctggagctgcaggagtgcctggagcacggaaggatcgccaagttttccaaggtgcgcacaatcaccacacggagcaattccatcaagcagggcaaggatcagcacttccccgtgttcatgaacgagaaggaggacatcctgtggtgtaccgagatggagagagtgttcggctttccagtgcactacacagacgtgtctaacatgagcaggctggcaaggcagcggctgctgggcagatcttggagcgtgcccgtgatcaggcacctgttcgcccctctgaaggagtattttgcctgcgtgagcagcggcaactccaatgccaacagccggggcccctctttcagctccggattggtgcctctgagcctgaggggctcccacagtccccttgagatgtataaaactgtgcctgtgtggaagagagagccagtgcgggtgctgtccctttttggtgacatcaagaaagagctgacgactttgggctttctggaaaacggctctgacccgggccgactgaaacatttggacgatgtcaccaatacggtgaggagggacgtggaagaatggggcccgttcgacctcgtgtacggctccacgccgcccctcggccacgcctgtgaccatcctcccgggtggtacctgttccagttccaccgtgtgcttcagtacgcgaggcccaggccgggcagcccgcaggccttcttctggatgtttgtggacaacctggtgctgaccgaggatgaccgggctgtagccactcgcttcctggagactgacccggtgaccatccaggacgtctgtggcagagctgtccggaacgccgtgcacgtgtggagcaacatcccggccgtgaaaagcaggcactcggccctgttttcccaggaggaatcattcctgcgggctcaggacaggcagagagcaaagccccccgcccgggggccagccaagctggtgaagaattgttttctccccctgagagaatatttcaagtatttttcaacagaattcacttcctctttgggaggaccctcctctggcgccccaccacctagcggcggctcccctgccggctctccaaccagcacagaggagggcaccagcgagtccgccacaccagagtctggacctggcaccagcacagagccatccgagggctctgccccaggctctcctgcaggcagccctacctccaccgaagagggcaccagcacagagccttctgagggcagcgccccaggcacctctacagagccaagcgagctcgaggacaagaagtacagcatcggcctggccatcggcaccaactctgtgggctgggccgtgatcaccgacgagtacaaggtgcccagcaagaaattcaaggtgctgggcaacaccgaccggcacagcatcaagaagaacctgatcggagccctgctgttcgacagcggcgaaacagccgaggccacccggctgaagagaaccgccagaagaagatacaccagacggaagaaccggatctgctatctgcaagagatcttcagcaacgagatggccaaggtggacgacagcttcttccacagactggaagagtccttcctggtggaagaggataagaagcacgagcggcaccccatcttcggcaacatcgtggacgaggtggcctaccacgagaagtaccccaccatctaccacctgagaaagaaactggtggacagcaccgacaaggccgacctgcggctgatctatctggccctggcccacatgatcaagttccggggccacttcctgatcgagggcgacctgaaccccgacaacagcgacgtggacaagctgttcatccagctggtgcagacctacaaccagctgttcgaggaaaaccccatcaacgccagcggcgtggacgccaaggccatcctgtctgccagactgagcaagagcagacggctggaaaatctgatcgcccagctgcccggcgagaagaagaatggcctgttcggcaacctgattgccctgagcctgggcctgacccccaacttcaagagcaacttcgacctggccgaggatgccaaactgcagctgagcaaggacacctacgacgacgacctggacaacctgctggcccagatcggcgaccagtacgccgacctgtttctggccgccaagaacctgtccgacgccatcctgctgagcgacatcctgagagtgaacaccgagatcaccaaggcccccctgagcgcctctatgatcaagagatacgacgagcaccaccaggacctgaccctgctgaaagctctcgtgcggcagcagctgcctgagaagtacaaagagattttcttcgaccagagcaagaacggctacgccggctacattgacggcggagccagccaggaagagttctacaagttcatcaagcccatcctggaaaagatggacggcaccgaggaactgctcgtgaagctgaacagagaggacctgctgcggaagcagcggaccttcgacaacggcagcatcccccaccagatccacctgggagagctgcacgccattctgcggcggcaggaagatttttacccattcctgaaggacaaccgggaaaagatcgagaagatcctgaccttccgcatcccctactacgtgggccctctggccaggggaaacagcagattcgcctggatgaccagaaagagcgaggaaaccatcaccccctggaacttcgaggaagtggtggacaagggcgcttccgcccagagcttcatcgagcggatgaccaacttcgataagaacctgcccaacgagaaggtgctgcccaagcacagcctgctgtacgagtacttcaccgtgtataacgagctgaccaaagtgaaatacgtgaccgagggaatgagaaagcccgccttcctgagcggcgagcagaaaaaggccatcgtggacctgctgttcaagaccaaccggaaagtgaccgtgaagcagctgaaagaggactacttcaagaaaatcgagtgcttcgactccgtggaaatctccggcgtggaagatcggttcaacgcctccctgggcacataccacgatctgctgaaaattatcaaggacaaggacttcctggacaatgaggaaaacgaggacattctggaagatatcgtgctgaccctgacactgtttgaggacagagagatgatcgaggaacggctgaaaacctatgcccacctgttcgacgacaaagtgatgaagcagctgaagcggcggagatacaccggctggggcaggctgagccggaagctgatcaacggcatccgggacaagcagtccggcaagacaatcctggatttcctgaagtccgacggcttcgccaacagaaacttcatgcagctgatccacgacgacagcctgacctttaaagaggacatccagaaagcccaggtgtccggccagggcgatagcctgcacgagcacattgccaatctggccggcagccccgccattaagaagggcatcctgcagacagtgaaggtggtggacgagctcgtgaaagtgatgggccggcacaagcccgagaacatcgtgatcgaaatggccagagagaaccagaccacccagaagggacagaagaacagccgcgagagaatgaagcggatcgaagagggcatcaaagagctgggcagccagatcctgaaagaacaccccgtggaaaacacccagctgcagaacgagaagctgtacctgtactacctgcagaatgggcgggatatgtacgtggaccaggaactggacatcaaccggctgtccgactacgatgtggacgccatcgtgcctcagagctttctgaaggacgactccatcgacaacaaggtgctgaccagaagcgacaagaaccggggcaagagcgacaacgtgccctccgaagaggtcgtgaagaagatgaagaactactggcggcagctgctgaacgccaagctgattacccagagaaagttcgacaatctgaccaaggccgagagaggcggcctgagcgaactggataaggccggcttcatcaagagacagctggtggaaacccggcagatcacaaagcacgtggcacagatcctggactcccggatgaacactaagtacgacgagaatgacaagctgatccgggaagtgaaagtgatcaccctgaagtccaagctggtgtccgatttccggaaggatttccagttttacaaagtgcgcgagatcaacaactaccaccacgcccacgacgcctacctgaacgccgtcgtgggaaccgccctgatcaaaaagtaccctaagctggaaagcgagttcgtgtacggcgactacaaggtgtacgacgtgcggaagatgatcgccaagagcgagcaggaaatcggcaaggctaccgccaagtacttcttctacagcaacatcatgaactttttcaagaccgagattaccctggccaacggcgagatccggaagcggcctctgatcgagacaaacggcgaaaccggggagatcgtgtgggataagggccgggattttgccaccgtgcggaaagtgctgagcatgccccaagtgaatatcgtgaaaaagaccgaggtgcagacaggcggcttcagcaaagagtctatcctgcccaagaggaacagcgataagctgatcgccagaaagaaggactgggaccctaagaagtacggcggcttcgacagccccaccgtggcctattctgtgctggtggtggccaaagtggaaaagggcaagtccaagaaactgaagagtgtgaaagagctgctggggatcaccatcatggaaagaagcagcttcgagaagaatcccatcgactttctggaagccaagggctacaaagaagtgaaaaaggacctgatcatcaagctgcctaagtactccctgttcgagctggaaaacggccggaagagaatgctggcctctgccggcgaactgcagaagggaaacgaactggccctgccctccaaatatgtgaacttcctgtacctggccagccactatgagaagctgaagggctcccccgaggataatgagcagaaacagctgtttgtggaacagcacaagcactacctggacgagatcatcgagcagatcagcgagttctccaagagagtgatcctggccgacgctaatctggacaaagtgctgtccgcctacaacaagcaccgggataagcccatcagagagcaggccgagaatatcatccacctgtttaccctgaccaatctgggagcccctgccgccttcaagtactttgacaccaccatcgaccggaagaggtacaccagcaccaaagaggtgctggacgccaccctgatccaccagagcatcaccggcctgtacgagacacggatcgacctgtctcagctgggaggcgacagccccaagaagaagagaaaggtgggagtcgacggatccagcggctccgagaccccaggcacatctgagagcgccacccctgagtccaccggtatgaacaattcacaggggagagtgacattcgaagacgtgaccgtgaacttcacccagggagaatggcagcgcttgaacccagaacaaaggaacctctatcgggacgtgatgctggaaaactactcaaatttggtgagcgttgggcagggtgagaccactaagcctgacgtgatcctgagattggaacagggcaaggagccttggctcgaggaagaggaagtcctgggctcagggagggccgagaaaaacggtgatataggaggccagatatggaagcctaaggacgtcaaggagagcctgagcgctaaacgtccggcagcaaccaaaaaagcaggtcaggccaagaaaaaatgaggatcctgagtctagaaaagatatatataggattgaagatctctcagttaagtctacaaaaaaaaaaaaaaaaaaaaaaaaaaaaaaaaaaaaaaaaaaaaaaaaaaaaaaaaaaaaaaaaaaaaaaaaaaaaaaaaaaaaaaaaaaaaaaaaaaaaaaaaaaaaaaaaaaaaaaaaagaagagcgaattcactggccgtcgttttacaacgtcgtgactgggaaaaccctggcgttacccaacttaatcgccttgcagcacatccccctttcgccagctggcgtaatagcgaagaggcccgcaccgatcgcccttcccaacagttgcgcagcctgaatggcgaatggcgcctgatgcggtattttctccttacgcatctgtgcggtatttcacaccgcatatggtgcactctcagtacaatctgctctgatgccgcatagttaagccagccccgacacccgccaacacccgctgacgcgccctgacgggcttgtctgctcccggcatccgcttacagacaagctgtgaccgtctccgggagctgcatgtgtcagaggttttcaccgtcatcaccgaaacgcgcgatgcagctctggcccgtgtctcaaaatctctgatgttacattgcacaagataaaaatatatcatcatgaacaataaaactgtctgcttacataaacagtaatacaaggggtgttatgagccatattcaacgggaaacgtcgaggccgcgattaaattccaacatggatgctgatttatatgggtataaatgggctcgcgataatgtcgggcaatcaggtgcgacaatctatcgcttgtatgggaagcccgatgcgccagagttgtttctgaaacatggcaaaggtagcgttgccaatgatgttacagatgagatggtcagactaaactggctgacggaatttatgcctcttccgaccatcaagcattttatccgtactcctgatgatgcatggttactcaccactgcgatccccggaaaaacagcattccaggtattagaagaatatcctgattcaggtgaaaatattgttgatgcgctggcagtgttcctgcgccggttgcattcgattcctgtttgtaattgtccttttaacagcgatcgcgtatttcgtctcgctcaggcgcaatcacgaatgaataacggtttggttgatgcgagtgattttgatgacgagcgtaatggctggcctgttgaacaagtctggaaagaaatgcataaacttttgccattctcaccggattcagtcgtcactcatggtgatttctcacttgataaccttatttttgacgaggggaaattaataggttgtattgatgttggacgagtcggaatcgcagaccgataccaggatcttgccatcctatggaactgcctcggtgagttttctccttcattacagaaacggctttttcaaaaatatggtattgataatcctgatatgaataaattgcagtttcatttgatgctcgatgagtttttctaatcagaattggttaattggttgtaacattattcagattgggcttgatttaaaacttcatttttaatttaaaaggatctaggtgaagatcctttttgataatctcatgaccaaaatcccttaacgtgagttttcgttccactgagcgtcagaccccgtagaaaagatcaaaggatcttcttgagatcctttttttctgcgcgtaatctgctgcttgcaaacaaaaaaaccaccgctaccagcggtggtttgtttgccggatcaagagctaccaactctttttccgaaggtaactggcttcagcagagcgcagataccaaatactgttcttctagtgtagccgtagttaggccaccacttcaagaactctgtagcaccgcctacatacctcgctctgctaatcctgttaccagtggctgctgccagtggcgataagtcgtgtcttaccgggttggactcaagacgatagttaccggataaggcgcagcggtcgggctgaacggggggttcgtgcacacagcccagcttggagcgaacgacctacaccgaactgagatacctacagcgtgagctatgagaaagcgccacgcttcccgaagggagaaaggcggacaggtatccggtaagcggcagggtcggaacaggagagcgcacgagggagcttccagggggaaacgcctggtatctttatagtcctgtcgggtttcgccacctctgacttgagcgtcgatttttgtgatgctcgtcaggggggcggagcctatggaaaaacgccagcaacgcggcctttttacggttcctggccttttgctggccttttgctcacatgttctttcctgcgttatcccctgattctgtggataaccgtattaccgcctttgagtgagctgataccgctcgccgcagccgaacgaccgagcgcagcgagtcagtgagcgaggaagcggcccaatacgcaaaccgcctctccccgcgcgttggccgattcattaatgcagctggcacgacaggtttcccgactggaaagcgggcagtgagcgcaacgcaattaatgtgagttagctcactcattaggcaccccaggctttacactttatgcttccggctcgtatgttgtgtggaattgtgagcggataacaatttcacacaggaaacagctatgaccatgattacgccaagctttaatacgactcactata